(19) United States
(12) Patent Application Publication
(10) Pub. No.: US 2022/0098329 A1
(43) Pub. Date: Mar. 31, 2022

(54) HETERODIMERIC TETRAVALENCY AND SPECIFICITY ANTIBODY COMPOSITIONS AND USES THEREOF

(71) Applicant: Memorial Sloan Kettering Cancer Center, New York, NY (US)

(72) Inventors: Brian Santich, New York, NY (US); Nai-Kong V. Cheung, New York, NY (US); Morgan Huse, New York, NY (US)

(73) Assignee: Memorial Sloan Kettering Cancer Center, New York, NY (US)

(21) Appl. No.: 17/298,008

(22) PCT Filed: Nov. 29, 2019
(86) PCT No.: PCT/US2019/063854

§ 371 Date: May 27, 2021

Related U.S. Application Data
(60) Provisional application No. 62/774,111, filed on Nov. 30, 2018.
(60) Provisional application No. 62/794,523, filed on Jan. 18, 2019.

(51) Int. Cl. C07K 16/46; C07K 16/28; C07K 16/30; C07K 16/32; A61P 35/00; A61K 39/395

(52) U.S. Cl. CPC C07K 16/468; C07K 16/2809; A61K 39/39558; C07K 16/32; A61P 35/00; C07K 16/3084

(57) ABSTRACT

The present disclosure relates generally to immunoglobulin-related compositions (e.g., heterodimeric trivalent/tetravalent multispecific antibodies) that specifically bind to three or four distinct target antigens. The immunoglobulin-related compositions described herein are useful in methods for detecting and treating cancer in a subject in need thereof.

### CROSS-REFERENCE TO RELATED PATENT APPLICATIONS

[0001] This application is a U.S. National Stage Application under 35 U.S.C. § 371 of International Patent Application No. PCT/US2019/063854, filed on Nov. 29, 2019, which claims the benefit of and priority to US Provisional Appl. Nos. 62/774,111, filed Nov. 30, 2018, and 62/794,523, filed Jan. 18, 2019, the disclosure of each of which are incorporated by reference herein in its entirety.

### SEQUENCE LISTING

[0002] The instant application contains a Sequence Listing which has been submitted electronically in ASCII format and is hereby incorporated by reference in its entirety. Said ASCII copy, created on Dec. 23, 2019, is named 115872-0497 SL.txt and is 1,200,059 bytes in size.

### TECHNICAL FIELD

[0003] The present technology relates generally to the preparation of heterodimeric trivalent/tetravalent multispecific antibodies that specifically bind three or four distinct target antigens, and their uses. The heterodimeric trivalent/tetravalent multispecific antibodies described herein are useful in methods for detecting and treating cancer in a subject in need thereof.

### BACKGROUND

[0004] The following description of the background of the present technology is provided simply as an aid in understanding the present technology and is not admitted to describe or constitute prior art to the present technology.

[0005] Many antibody platforms exist, including heterodimeric IgG and BiTE. See Spiess et al., Mol Immunol 67:95-106 (2015); Shima et al., N Engl J Med 374:2044-2053 (2016); Topp et al., Lancet Oncol 16:57-66 (2015). However, no single antibody platform to date has shown a clear and significant functional advantage over others within the clinic.

[0006] In the case of multispecific antibodies that engage immune cells, such as BiTEs, the ideal structure that maximizes anti-tumor activity has not been defined, and likely varies based on the target antigens or the parental antibodies (Wu & Cheung, Pharmacology & Therapeutics 182:161-175 (2018). Important properties may include antigen size and proximity to the cell membrane as well as serum half-life. See Bluemel et al., Cancer Immunol Immunother 59:1197-1209 (2010); Suzuki et al., J Immunol 184:1968-1976 (2010); Yang et al., Cancer Res 64:6673-6678 (2004). Even less is understood about the spatial orientation imparted by the antibody on the cell-to-cell interface, the strength of each individual specificity interaction, or the number of interactions. Moreover, the size of the antibody format, the flexibility of each binding domain, and their relative orientations to one another may influence the capacity to properly or effectively engage multiple antigens at once. Given these different complexities, it is of paramount importance to understand if a given platform design is properly optimized for therapeutic function.

### Summary of the Present Technology

[0007] In one aspect, the present disclosure provides a heterodimeric multispecific antibody comprising a first polypeptide chain, a second polypeptide chain, a third polypeptide chain and a fourth polypeptide chain, wherein the first and second polypeptide chains are covalently bonded to one another, the second and third polypeptide chains are covalently bonded to one another, and the third and fourth polypeptide chain, and wherein: (a) the first polypeptide chain comprises in the N-terminal to C-terminal direction: (i) a light chain variable domain of a first immunoglobulin (VL-1) that is capable of specifically binding to a first epitope; (ii) a light chain constant domain of the first immunoglobulin (CL-1); (iii) a flexible peptide linker comprising the amino acid sequence (GGGGS)₃ (SEQ ID NO: 2506); and (iv) a light chain variable domain of a second immunoglobulin (VL-2) that is linked to a complementary heavy chain variable domain of the second immunoglobulin (VH-2), or a heavy chain variable domain of a second immunoglobulin (VH-2) that is linked to a complementary light chain variable domain of the second immunoglobulin (VL-2), wherein VL-2 and VH-2 are capable of specifically binding to a second epitope, and are linked together via a flexible peptide linker comprising the amino acid sequence (GGGGS)₆ (SEQ ID NO: 2507) to form a single-chain variable fragment; (b) the second polypeptide comprises in the N-terminal to C-terminal direction: (i) a heavy chain variable domain of the first immunoglobulin (VH-1) that is capable of specifically binding to the first epitope; (ii) a first CH1 domain of the first immunoglobulin (CH1-1); and (iii) a first heterodimerization domain of the first immunoglobulin, wherein the first heterodimerization domain is incapable of forming a stable homodimer with another first heterodimerization domain; (c) the third polypeptide comprises in the N-terminal to C-terminal direction: (i) a heavy chain variable domain of a third immunoglobulin (VH-3) that is capable of specifically binding to a third epitope; (ii) a second CH1 domain of the third immunoglobulin (CH1-3); and (iii) a second heterodimerization domain of the third immunoglobulin, wherein the second heterodimerization domain comprises an amino acid sequence or a nucleic acid sequence that is distinct from the first heterodimerization domain of the first immunoglobulin, wherein the second heterodimerization domain is incapable of forming a stable homodimer with another second heterodimerization domain, and wherein the second heterodimerization domain of the third immunoglobulin is configured to form a heterodimer with the first heterodimerization domain of the first immunoglobulin; (d) the fourth polypeptide comprises in the N-terminal to C-terminal direction: (i) a light chain variable domain of the third immunoglobulin (VL-3) that is capable of specifically binding to the third epitope; (ii) a light chain constant domain of the third immunoglobulin (CL-3); (iii) a flexible peptide linker comprising the amino acid sequence (GGGGS)₃ (SEQ ID NO: 2506); and (iv) a light chain variable domain of a fourth immunoglobulin (VL-4) that is linked to a complementary heavy chain variable domain of the fourth immunoglobulin (VH-4), or a heavy chain variable domain of a fourth immunoglobulin (VH-4) that is linked to a complementary light chain variable domain of the fourth immunoglobulin (VL-4), wherein VL-4 and VH-4 are capable of specifically binding to the second epitope, and are linked together via a flexible peptide linker comprising the amino acid sequence (GGGGS)₆ (SEQ ID NO: 2507) to form a single-chain variable fragment, and wherein each of VL-1 and VL-3 independently comprises the CDR1 sequence, the CDR2 sequence and the CDR3 sequence of a V_{L} amino acid sequence selected from any one of SEQ ID NOs: 1, 9, 17, 25, 33, 41, 49, 57, 65, 73, 81, 89, 97, 105, 113, 121, 129, 145, 153, 161, 169, 177, 193, 201, 233, 241, 257, 273, 281, 289, 297, 305, 313, 321, 329, 337, 345, 353, 361, 369, 377, 385, 393, 401, 409, 417, 425, 433, 441, 449, 457, 465, 481, 489, 497, 521, 529, 537, 545, 553, 561, 609, 617, 681, 689, 697, 705, 713, 721, 729, 737, 745, 753, 761, 769, 777, 785, 793, 801, 809, 817, 825, 833, 841, 849, 857, 865, 873, 881, 889, 945, 953, 961, 977, 985, 993, 1001, 1009, 1017, 1025, 1033, 1041, 1049, 1065, 1073, 1081, 1089, 1097, 1105, 1113, 1121, 1129, 1137, 1145, 1153, 1161, 1169, 1177, 1185, 1193, 1201, 1209, 1217, 1225, 1233, 1241, 1249, 1257, 1265, 1273, 1281, 1289, 1297, 1305, 1313, 1321, 1329, 1337, 1345, 1353, 1361, 1369, 1377, 1385, 1393, 1401, 1409, 1417, 1425, 1433, 1441, 1449, 1457, 1465, 1473, 1481, 1489, 1497, 1505, 1513, 1521, 1529, 1545, 1553, 1561, 1569, 1577, 1585, 1593, 1601, 1609, 1617, 1625, 1633, 1649, 1657, 1673, 1681, 1689, 1697, 1705, 1713, 1721, 1729, 1737, 1745, 1753, 1761, 1769, 1777, 1785, 1793, 1801, 1809, 1817, 1833, 1841, 1849, 1857, 1865, 1873, 1881, 1889, 1913, 1937, 1945, 1953, 1961, 1969, 1977, 1985, 1993, 2001, 2009, 2017, 2025, 2033, 2041, 2049, 2057, 2065, 2073, 2081, 2089, 2097, 2105, 2113, 2121, 2129, 2137, 2145, 2153, 2161, 2169, 2177, 2185, 2193, 2201, 2209, 2217, 2225, 2233, 2241, 2249, 2257, 2265, 2273, 2281, 2297, 2305, 2313, 2321, 2329, 2337 and 2345; and/or wherein each of VH-1 and VH-3 independently comprises the CDR1 sequence, the CDR2 sequence and the CDR3 sequence of a V_{H} amino acid sequence selected from any one of SEQ ID NOs: 5, 13, 21, 29, 37, 45, 53, 61, 69, 77, 85, 93, 101, 109, 117, 125, 133, 149, 157, 165, 173, 181, 197, 205, 237, 245, 261, 277, 285, 293, 301, 309, 317, 325, 333, 341, 349, 357, 365, 373, 381, 389, 397, 405, 413, 421, 429, 437, 445, 453, 461, 469, 485, 493, 501, 525, 533, 541, 549, 557, 565, 613, 621, 685, 693, 701, 709, 717, 725, 733, 741, 749, 757, 765, 773, 781, 789, 797, 805, 813, 821, 829, 837, 845, 853, 861, 869, 877, 885, 893, 949, 957, 965, 981, 989, 997, 1005, 1013, 1021, 1029, 1037, 1045, 1053, 1069, 1077, 1085, 1093, 1101, 1109, 1117, 1125, 1133, 1141, 1149, 1157, 1165, 1173, 1181, 1189, 1197, 1205, 1213, 1221, 1229, 1237, 1245, 1253, 1261, 1269, 1277, 1285, 1293, 1301, 1309, 1317, 1325, 1333, 1341, 1349, 1357, 1365, 1373, 1381, 1389, 1397, 1405, 1413, 1421, 1429, 1437, 1445, 1453, 1461, 1469, 1477, 1485, 1493, 1501, 1509, 1517, 1525, 1533, 1549, 1557, 1565, 1573, 1581, 1589, 1597, 1605, 1613, 1621, 1629, 1637, 1653, 1661, 1677, 1685, 1693, 1701, 1709, 1717, 1725, 1733, 1741, 1749, 1757, 1765, 1773, 1781, 1789, 1797, 1805, 1813, 1821, 1837, 1845, 1853, 1861, 1869, 1877, 1885, 1893, 1917, 1941, 1949, 1957, 1965, 1973, 1981, 1989, 1997, 2005, 2013, 2021, 2029, 2037, 2045, 2053, 2061, 2069, 2077, 2085, 2093, 2101, 2109, 2117, 2125, 2133, 2141, 2149, 2157, 2165, 2173, 2181, 2189, 2197, 2205, 2213, 2221, 2229, 2237, 2245, 2253, 2261, 2269, 2277, 2285, 2301, 2309, 2317, 2325, 2333, 2341, and 2349.

[0008] In one aspect, the present disclosure provides a heterodimeric multispecific antibody comprising a first polypeptide chain, a second polypeptide chain, a third polypeptide chain and a fourth polypeptide chain, wherein the first and second polypeptide chains are covalently bonded to one another, the second and third polypeptide chains are covalently bonded to one another, and the third and fourth polypeptide chain, and wherein: (a) the first polypeptide chain comprises in the N-terminal to C-terminal direction: (i) a light chain variable domain of a first immunoglobulin (VL-1) that is capable of specifically binding to a first epitope; (ii) a light chain constant domain of the first immunoglobulin (CL-1); (iii) a flexible peptide linker comprising the amino acid sequence (GGGGS)₃ (SEQ ID NO: 2506); and (iv) a light chain variable domain of a second immunoglobulin (VL-2) that is linked to a complementary heavy chain variable domain of the second immunoglobulin (VH-2), or a heavy chain variable domain of a second immunoglobulin (VH-2) that is linked to a complementary light chain variable domain of the second immunoglobulin (VL-2), wherein the VL-2 and VH-2 are capable of specifically binding to a second epitope, and are linked together via a flexible peptide linker comprising the amino acid sequence (GGGGS)₆ (SEQ ID NO: 2507) to form a single-chain variable fragment; (b) the second polypeptide comprises in the N-terminal to C-terminal direction: (i) a heavy chain variable domain of the first immunoglobulin (VH-1) that is capable of specifically binding to the first epitope; (ii) a first CH1 domain of the first immunoglobulin (CH1-1); and (iii) a first heterodimerization domain of the first immunoglobulin, wherein the first heterodimerization domain is incapable of forming a stable homodimer with another first heterodimerization domain; (c) the third polypeptide comprises in the N-terminal to C-terminal direction: (i) a heavy chain variable domain of a third immunoglobulin (VH-3) that is capable of specifically binding to the first epitope; (ii) a second CH1 domain of the third immunoglobulin (CH1-3); and (iii) a second heterodimerization domain of the third immunoglobulin, wherein the second heterodimerization domain comprises an amino acid sequence or a nucleic acid sequence that is distinct from the first heterodimerization domain of the first immunoglobulin, wherein the second heterodimerization domain is incapable of forming a stable homodimer with another second heterodimerization domain, and wherein the second heterodimerization domain of the third immunoglobulin is configured to form a heterodimer with the first heterodimerization domain of the first immunoglobulin; (d) the fourth polypeptide comprises in the N-terminal to C-terminal direction: (i) a light chain variable domain of the third immunoglobulin (VL-3) that is capable of specifically binding to the first epitope; (ii) a light chain constant domain of the third immunoglobulin (CL-3); (iii) a flexible peptide linker comprising the amino acid sequence (GGGGS)₃ (SEQ ID NO: 2506); and (iv) a light chain variable domain of a fourth immunoglobulin (VL-4) that is linked to a complementary heavy chain variable domain of the fourth immunoglobulin (VH-4), or a heavy chain variable domain of a fourth immunoglobulin (VH-4) that is linked to a complementary light chain variable domain of the fourth immunoglobulin (VL-4), wherein the VL-4 and VH-4 are capable of specifically binding to a third epitope, and are linked together via a flexible peptide linker comprising the amino acid sequence (GGGGS)₆ (SEQ ID NO: 2507) to form a single-chain variable fragment, and wherein each of VL-2 and VL-4 independently comprises the CDR1 sequence, the CDR2 sequence and the CDR3 sequence of a V_{L} amino acid sequence selected from any one of SEQ ID NOs: 17, 25, 33, 41, 121, 137, 169, 177, 185, 193, 201, 209, 217, 225, 233, 241, 249, 257, 265, 321, 329, 337, 393, 401, 409, 473, 481, 489, 497, 505, 513, 545, 553, 561, 569, 577, 585, 593, 601, 625, 633, 641, 649, 657, 665, 673, 681, 689, 697, 705, 713, 721, 729, 737, 745, 753, 761, 769, 785, 793, 801, 809, 817, 849, 857, 865, 873, 881, 889, 897, 905, 913, 921, 929, 937, 945, 969, 977, 1009, 1057, 1537, 1569, 1601, 1641, 1665, 1825, 1865, 1897, 1905, 1913, 1921, 1929, 2265, 2281 2289, 2329, and 2345; and/or wherein each of VH-2 and VH-4 independently comprises the CDR1 sequence, the CDR2 sequence and the CDR3 sequence of a V_{H} amino acid sequence selected from any one of SEQ ID NOs: 21, 29, 37, 45, 125, 141, 173, 181, 189, 197, 205, 213, 221, 229, 237, 245, 253, 261, 269, 325, 333, 341, 397, 405, 413, 477, 485, 493, 501, 509, 517, 549, 557, 565, 573, 581, 589, 597, 605, 629, 637, 645, 653, 661, 669, 677, 685, 693, 701, 709, 717, 725, 733, 741, 749, 757, 765, 773, 789, 797, 805, 813, 821, 853, 861, 869, 877, 885, 893, 901, 909, 917, 925, 933, 941, 949, 973, 981, 1013, 1061, 1541, 1573, 1605, 1645, 1669, 1829, 1869, 1901, 1909, 1917, 1925, 1933, 2269, 2285, 2293, 2333, and 2349.

[0009] In another aspect, the present disclosure provides a heterodimeric multispecific antibody comprising a first polypeptide chain, a second polypeptide chain, a third polypeptide chain and a fourth polypeptide chain, wherein the first and second polypeptide chains are covalently bonded to one another, the second and third polypeptide chains are covalently bonded to one another, and the third and fourth polypeptide chain, and wherein: (a) the first polypeptide chain comprises in the N-terminal to C-terminal direction: (i) a light chain variable domain of a first immunoglobulin (VL-1) that is capable of specifically binding to a first epitope; (ii) a light chain constant domain of the first immunoglobulin (CL-1); (iii) a flexible peptide linker comprising the amino acid sequence (GGGGS)₃ (SEQ ID NO: 2506); and (iv) a light chain variable domain of a second immunoglobulin (VL-2) that is linked to a complementary heavy chain variable domain of the second immunoglobulin (VH-2), or a heavy chain variable domain of a second immunoglobulin (VH-2) that is linked to a complementary light chain variable domain of the second immunoglobulin (VL-2), wherein VL-2 and VH-2 are capable of specifically binding to a second epitope, and are linked together via a flexible peptide linker comprising the amino acid sequence (GGGGS)₆ (SEQ ID NO: 2507) to form a single-chain variable fragment; (b) the second polypeptide comprises in the N-terminal to C-terminal direction: (i) a heavy chain variable domain of the first immunoglobulin (VH-1) that is capable of specifically binding to the first epitope; (ii) a first CH1 domain of the first immunoglobulin (CH1-1); and (iii) a first heterodimerization domain of the first immunoglobulin, wherein the first heterodimerization domain is incapable of forming a stable homodimer with another first heterodimerization domain; (c) the third polypeptide comprises in the N-terminal to C-terminal direction: (i) a heavy chain variable domain of a third immunoglobulin (VH-3) that is capable of specifically binding to a third epitope; (ii) a second CH1 domain of the third immunoglobulin (CH1-3); and (iii) a second heterodimerization domain of the third immunoglobulin, wherein the second heterodimerization domain comprises an amino acid sequence or a nucleic acid sequence that is distinct from the first heterodimerization domain of the first immunoglobulin, wherein the second heterodimerization domain is incapable of forming a stable homodimer with another second heterodimerization domain, and wherein the second heterodimerization domain of the third immunoglobulin is configured to form a heterodimer with the first heterodimerization domain of the first immunoglobulin; (d) the fourth polypeptide comprises in the N-terminal to C-terminal direction: (i) a light chain variable domain of the third immunoglobulin (VL-3) that is capable of specifically binding to the third epitope; (ii) a light chain constant domain of the third immunoglobulin (CL-3); (iii) a flexible peptide linker comprising the amino acid sequence (GGGGS)₃ (SEQ ID NO: 2506); and (iv) a light chain variable domain of a fourth immunoglobulin (VL-4) that is linked to a complementary heavy chain variable domain of the fourth immunoglobulin (VH-4), or a heavy chain variable domain of a fourth immunoglobulin (VH-4) that is linked to a complementary light chain variable domain of the fourth immunoglobulin (VL-4), wherein VL-4 and VH-4 are capable of specifically binding to the fourth epitope, and are linked together via a flexible peptide linker comprising the amino acid sequence (GGGGS)₆ (SEQ ID NO: 2507) to form a single-chain variable fragment; and wherein each of VL-1 and VL-3 independently comprises the CDR1 sequence, the CDR2 sequence and the CDR3 sequence of a V_{L} amino acid sequence selected from any one of SEQ ID NOs: 1, 9, 17, 25, 33, 41, 49, 57, 65, 73, 81, 89, 97, 105, 113, 121, 129, 145, 153, 161, 169, 177, 193, 201, 233, 241, 257, 273, 281, 289, 297, 305, 313, 321, 329, 337, 345, 353, 361, 369, 377, 385, 393, 401, 409, 417, 425, 433, 441, 449, 457, 465, 481, 489, 497, 521, 529, 537, 545, 553, 561, 609, 617, 681, 689, 697, 705, 713, 721, 729, 737, 745, 753, 761, 769, 777, 785, 793, 801, 809, 817, 825, 833, 841, 849, 857, 865, 873, 881, 889, 945, 953, 961, 977, 985, 993, 1001, 1009, 1017, 1025, 1033, 1041, 1049, 1065, 1073, 1081, 1089, 1097, 1105, 1113, 1121, 1129, 1137, 1145, 1153, 1161, 1169, 1177, 1185, 1193, 1201, 1209, 1217, 1225, 1233, 1241, 1249, 1257, 1265, 1273, 1281, 1289, 1297, 1305, 1313, 1321, 1329, 1337, 1345, 1353, 1361, 1369, 1377, 1385, 1393, 1401, 1409, 1417, 1425, 1433, 1441, 1449, 1457, 1465, 1473, 1481, 1489, 1497, 1505, 1513, 1521, 1529, 1545, 1553, 1561, 1569, 1577, 1585, 1593, 1601, 1609, 1617, 1625, 1633, 1649, 1657, 1673, 1681, 1689, 1697, 1705, 1713, 1721, 1729, 1737, 1745, 1753, 1761, 1769, 1777, 1785, 1793, 1801, 1809, 1817, 1833, 1841, 1849, 1857, 1865, 1873, 1881, 1889, 1913, 1937, 1945, 1953, 1961, 1969, 1977, 1985, 1993, 2001, 2009, 2017, 2025, 2033, 2041, 2049, 2057, 2065, 2073, 2081, 2089, 2097, 2105, 2113, 2121, 2129, 2137, 2145, 2153, 2161, 2169, 2177, 2185, 2193, 2201, 2209, 2217, 2225, 2233, 2241, 2249, 2257, 2265, 2273, 2281, 2297, 2305, 2313, 2321, 2329, 2337 and 2345; and/or wherein each of VH-1 and VH-3 independently comprises the CDR1 sequence, the CDR2 sequence and the CDR3 sequence of a V_{H} amino acid sequence selected from any one of SEQ ID NOs: 5, 13, 21, 29, 37, 45, 53, 61, 69, 77, 85, 93, 101, 109, 117, 125, 133, 149, 157, 165, 173, 181, 197, 205, 237, 245, 261, 277, 285, 293, 301, 309, 317, 325, 333, 341, 349, 357, 365, 373, 381, 389, 397, 405, 413, 421, 429, 437, 445, 453, 461, 469, 485, 493, 501, 525, 533, 541, 549, 557, 565, 613, 621, 685, 693, 701, 709, 717, 725, 733, 741, 749, 757, 765, 773, 781, 789, 797, 805, 813, 821, 829, 837, 845, 853, 861, 869, 877, 885, 893, 949, 957, 965, 981, 989, 997, 1005, 1013, 1021, 1029, 1037, 1045, 1053, 1069, 1077, 1085, 1093, 1101, 1109, 1117, 1125, 1133, 1141, 1149, 1157, 1165, 1173, 1181, 1189, 1197, 1205, 1213, 1221, 1229, 1237, 1245, 1253, 1261, 1269, 1277, 1285, 1293, 1301, 1309, 1317, 1325, 1333, 1341, 1349, 1357, 1365, 1373, 1381, 1389, 1397, 1405, 1413, 1421, 1429, 1437, 1445, 1453, 1461, 1469, 1477, 1485, 1493, 1501, 1509, 1517, 1525, 1533, 1549, 1557, 1565, 1573, 1581, 1589, 1597, 1605, 1613, 1621, 1629, 1637, 1653, 1661, 1677, 1685, 1693, 1701, 1709, 1717, 1725, 1733, 1741, 1749, 1757, 1765, 1773, 1781, 1789, 1797, 1805, 1813, 1821, 1837, 1845, 1853, 1861, 1869, 1877, 1885, 1893, 1917, 1941, 1949, 1957, 1965, 1973, 1981, 1989, 1997, 2005, 2013, 2021, 2029, 2037, 2045, 2053, 2061, 2069, 2077, 2085, 2093, 2101, 2109, 2117, 2125, 2133, 2141, 2149, 2157, 2165, 2173, 2181, 2189, 2197, 2205, 2213, 2221, 2229, 2237, 2245, 2253, 2261, 2269, 2277, 2285, 2301, 2309, 2317, 2325, 2333, 2341, and 2349; and/or wherein each of VL-2 and VL-4 independently comprises the CDR1 sequence, the CDR2 sequence and the CDR3 sequence of a V_{L} amino acid sequence selected from any one of SEQ ID NOs: 17, 25, 33, 41, 121, 137, 169, 177, 185, 193, 201, 209, 217, 225, 233, 241, 249, 257, 265, 321, 329, 337, 393, 401, 409, 473, 481, 489, 497, 505, 513, 545, 553, 561, 569, 577, 585, 593, 601, 625, 633, 641, 649, 657, 665, 673, 681, 689, 697, 705, 713, 721, 729, 737, 745, 753, 761, 769, 785, 793, 801, 809, 817, 849, 857, 865, 873, 881, 889, 897, 905, 913, 921, 929, 937, 945, 969, 977, 1009, 1057, 1537, 1569, 1601, 1641, 1665, 1825, 1865, 1897, 1905, 1913, 1921, 1929, 2265, 2281 2289, 2329, and 2345; and/or wherein each of VH-2 and VH-4 independently comprises the CDR1 sequence, the CDR2 sequence and the CDR3 sequence of a V_{H} amino acid sequence selected from any one of SEQ ID NOs: 21, 29, 37, 45, 125, 141, 173, 181, 189, 197, 205, 213, 221, 229, 237, 245, 253, 261, 269, 325, 333, 341, 397, 405, 413, 477, 485, 493, 501, 509, 517, 549, 557, 565, 573, 581, 589, 597, 605, 629, 637, 645, 653, 661, 669, 677, 685, 693, 701, 709, 717, 725, 733, 741, 749, 757, 765, 773, 789, 797, 805, 813, 821, 853, 861, 869, 877, 885, 893, 901, 909, 917, 925, 933, 941, 949, 973, 981, 1013, 1061, 1541, 1573, 1605, 1645, 1669, 1829, 1869, 1901, 1909, 1917, 1925, 1933, 2269, 2285, 2293, 2333, and 2349.

[0010] In another aspect, the present disclosure provides a heterodimeric multispecific antibody comprising a first polypeptide chain, a second polypeptide chain, a third polypeptide chain and a fourth polypeptide chain, wherein the first and second polypeptide chains are covalently bonded to one another, the second and third polypeptide chains are covalently bonded to one another, and the third and fourth polypeptide chain, and wherein: (a) the first polypeptide chain comprises in the N-terminal to C-terminal direction: (i) a light chain variable domain of a first immunoglobulin (VL-1) that is capable of specifically binding to a first epitope; (ii) a light chain constant domain of the first immunoglobulin (CL-1); (iii) a flexible peptide linker comprising the amino acid sequence (GGGGS)₃ (SEQ ID NO: 2506); and (iv) a light chain variable domain of a second immunoglobulin (VL-2) that is linked to a complementary heavy chain variable domain of the second immunoglobulin (VH-2), or a heavy chain variable domain of a second immunoglobulin (VH-2) that is linked to a complementary light chain variable domain of the second immunoglobulin (VL-2), wherein VL-2 and VH-2 are capable of specifically binding to a second epitope, and are linked together via a flexible peptide linker comprising the amino acid sequence (GGGGS)₆ (SEQ ID NO: 2507) to form a single-chain variable fragment; (b) the second polypeptide comprises in the N-terminal to C-terminal direction: (i) a heavy chain variable domain of the first immunoglobulin (VH-1) that is capable of specifically binding to the first epitope; (ii) a first CH1 domain of the first immunoglobulin (CH1-1); and (iii) a first heterodimerization domain of the first immunoglobulin, wherein the first heterodimerization domain is incapable of forming a stable homodimer with another first heterodimerization domain; (c) the third polypeptide comprises in the N-terminal to C-terminal direction: (i) a heavy chain variable domain of a third immunoglobulin (VH-3) that is capable of specifically binding to the first epitope; (ii) a second CH1 domain of the third immunoglobulin (CH1-3); and (iii) a second heterodimerization domain of the third immunoglobulin, wherein the second heterodimerization domain comprises an amino acid sequence or a nucleic acid sequence that is distinct from the first heterodimerization domain of the first immunoglobulin, wherein the second heterodimerization domain is incapable of forming a stable homodimer with another second heterodimerization domain, and wherein the second heterodimerization domain of the third immunoglobulin is configured to form a heterodimer with the first heterodimerization domain of the first immunoglobulin; (d) the fourth polypeptide comprises in the N-terminal to C-terminal direction: (i) a light chain variable domain of the third immunoglobulin (VL-3) that is capable of specifically binding to the first epitope; and (ii) a light chain constant domain of the third immunoglobulin (CL-3); and wherein VL-2 comprises the CDR1 sequence, the CDR2 sequence and the CDR3 sequence of a V_{L} amino acid sequence selected from any one of SEQ ID NOs: 17, 25, 33, 41, 121, 137, 169, 177, 185, 193, 201, 209, 217, 225, 233, 241, 249, 257, 265, 321, 329, 337, 393, 401, 409, 473, 481, 489, 497, 505, 513, 545, 553, 561, 569, 577, 585, 593, 601, 625, 633, 641, 649, 657, 665, 673, 681, 689, 697, 705, 713, 721, 729, 737, 745, 753, 761, 769, 785, 793, 801, 809, 817, 849, 857, 865, 873, 881, 889, 897, 905, 913, 921, 929, 937, 945, 969, 977, 1009, 1057, 1537, 1569, 1601, 1641, 1665, 1825, 1865, 1897, 1905, 1913, 1921, 1929, 2265, 2281 2289, 2329, and 2345; and/or wherein VH-2 comprises the CDR1 sequence, the CDR2 sequence and the CDR3 sequence of a V_{H} amino acid sequence selected from any one of SEQ ID NOs: 21, 29, 37, 45, 125, 141, 173, 181, 189, 197, 205, 213, 221, 229, 237, 245, 253, 261, 269, 325, 333, 341, 397, 405, 413, 477, 485, 493, 501, 509, 517, 549, 557, 565, 573, 581, 589, 597, 605, 629, 637, 645, 653, 661, 669, 677, 685, 693, 701, 709, 717, 725, 733, 741, 749, 757, 765, 773, 789, 797, 805, 813, 821, 853, 861, 869, 877, 885, 893, 901, 909, 917, 925, 933, 941, 949, 973, 981, 1013, 1061, 1541, 1573, 1605, 1645, 1669, 1829, 1869, 1901, 1909, 1917, 1925, 1933, 2269, 2285, 2293, 2333, and 2349. In some embodiments, both VH-1 and VH-3 comprise the CDR1 sequence, the CDR2 sequence and the CDR3 sequence of a V_{H} amino acid sequence selected from any one of SEQ ID NOs: 5, 13, 21, 29, 37, 45, 53, 61, 69, 77, 85, 93, 101, 109, 117, 125, 133, 149, 157, 165, 173, 181, 197, 205, 237, 245, 261, 277, 285, 293, 301, 309, 317, 325, 333, 341, 349, 357, 365, 373, 381, 389, 397, 405, 413, 421, 429, 437, 445, 453, 461, 469, 485, 493, 501, 525, 533, 541, 549, 557, 565, 613, 621, 685, 693, 701, 709, 717, 725, 733, 741, 749, 757, 765, 773, 781, 789, 797, 805, 813, 821, 829, 837, 845, 853, 861, 869, 877, 885, 893, 949, 957, 965, 981, 989, 997, 1005, 1013, 1021, 1029, 1037, 1045, 1053, 1069, 1077, 1085, 1093, 1101, 1109, 1117, 1125, 1133, 1141, 1149, 1157, 1165, 1173, 1181, 1189, 1197, 1205, 1213, 1221, 1229, 1237, 1245, 1253, 1261, 1269, 1277, 1285, 1293, 1301, 1309, 1317, 1325, 1333, 1341, 1349, 1357, 1365, 1373, 1381, 1389, 1397, 1405, 1413, 1421, 1429, 1437, 1445, 1453, 1461, 1469, 1477, 1485, 1493, 1501, 1509, 1517, 1525, 1533, 1549, 1557, 1565, 1573, 1581, 1589, 1597, 1605, 1613, 1621, 1629, 1637, 1653, 1661, 1677, 1685, 1693, 1701, 1709, 1717, 1725, 1733, 1741, 1749, 1757, 1765, 1773, 1781, 1789, 1797, 1805, 1813, 1821, 1837, 1845, 1853, 1861, 1869, 1877, 1885, 1893, 1917, 1941, 1949, 1957, 1965, 1973, 1981, 1989, 1997, 2005, 2013, 2021, 2029, 2037, 2045, 2053, 2061, 2069, 2077, 2085, 2093, 2101, 2109, 2117, 2125, 2133, 2141, 2149, 2157, 2165, 2173, 2181, 2189, 2197, 2205, 2213, 2221, 2229, 2237, 2245, 2253, 2261, 2269, 2277, 2285, 2301, 2309, 2317, 2325, 2333, 2341, and 2349; and/or both VL-1 and VL-3 comprise the CDR1 sequence, the CDR2 sequence and the CDR3 sequence of a V_{L} amino acid sequence selected from any one of SEQ ID NOs: 1, 9, 17, 25, 33, 41, 49, 57, 65, 73, 81, 89, 97, 105, 113, 121, 129, 145, 153, 161, 169, 177, 193, 201, 233, 241, 257, 273, 281, 289, 297, 305, 313, 321, 329, 337, 345, 353, 361, 369, 377, 385, 393, 401, 409, 417, 425, 433, 441, 449, 457, 465, 481, 489, 497, 521, 529, 537, 545, 553, 561, 609, 617, 681, 689, 697, 705, 713, 721, 729, 737, 745, 753, 761, 769, 777, 785, 793, 801, 809, 817, 825, 833, 841, 849, 857, 865, 873, 881, 889, 945, 953, 961, 977, 985, 993, 1001, 1009, 1017, 1025, 1033, 1041, 1049, 1065, 1073, 1081, 1089, 1097, 1105, 1113, 1121, 1129, 1137, 1145, 1153, 1161, 1169, 1177, 1185, 1193, 1201, 1209, 1217, 1225, 1233, 1241, 1249, 1257, 1265, 1273, 1281, 1289, 1297, 1305, 1313, 1321, 1329, 1337, 1345, 1353, 1361, 1369, 1377, 1385, 1393, 1401, 1409, 1417, 1425, 1433, 1441, 1449, 1457, 1465, 1473, 1481, 1489, 1497, 1505, 1513, 1521, 1529, 1545, 1553, 1561, 1569, 1577, 1585, 1593, 1601, 1609, 1617, 1625, 1633, 1649, 1657, 1673, 1681, 1689, 1697, 1705, 1713, 1721, 1729, 1737, 1745, 1753, 1761, 1769, 1777, 1785, 1793, 1801, 1809, 1817, 1833, 1841, 1849, 1857, 1865, 1873, 1881, 1889, 1913, 1937, 1945, 1953, 1961, 1969, 1977, 1985, 1993, 2001, 2009, 2017, 2025, 2033, 2041, 2049, 2057, 2065, 2073, 2081, 2089, 2097, 2105, 2113, 2121, 2129, 2137, 2145, 2153, 2161, 2169, 2177, 2185, 2193, 2201, 2209, 2217, 2225, 2233, 2241, 2249, 2257, 2265, 2273, 2281, 2297, 2305, 2313, 2321, 2329, 2337 and 2345.

[0011] In yet another aspect, the present disclosure provides a heterodimeric multispecific antibody comprising a first polypeptide chain, a second polypeptide chain, a third polypeptide chain and a fourth polypeptide chain, wherein the first and second polypeptide chains are covalently bonded to one another, the second and third polypeptide chains are covalently bonded to one another, and the third and fourth polypeptide chain, and wherein: (a) the first polypeptide chain comprises in the N-terminal to C-terminal direction: (i) a light chain variable domain of a first immunoglobulin (VL-1) that is capable of specifically binding to a first epitope; (ii) a light chain constant domain of the first immunoglobulin (CL-1); (iii) a flexible peptide linker comprising the amino acid sequence (GGGGS)₃ (SEQ ID NO: 2506); and (iv) a light chain variable domain of a second immunoglobulin (VL-2) that is linked to a complementary heavy chain variable domain of the second immunoglobulin (VH-2), or a heavy chain variable domain of a second immunoglobulin (VH-2) that is linked to a complementary light chain variable domain of the second immunoglobulin (VL-2), wherein VL-2 and VH-2 are capable of specifically binding to a second epitope, and are linked together via a flexible peptide linker comprising the amino acid sequence (GGGGS)₆ (SEQ ID NO: 2507) to form a single-chain variable fragment; (b) the second polypeptide comprises in the N-terminal to C-terminal direction: (i) a heavy chain variable domain of the first immunoglobulin (VH-1) that is capable of specifically binding to the first epitope; (ii) a first CH1 domain of the first immunoglobulin (CH1-1); and (iii) a first heterodimerization domain of the first immunoglobulin, wherein the first heterodimerization domain is incapable of forming a stable homodimer with another first heterodimerization domain; (c) the third polypeptide comprises in the N-terminal to C-terminal direction: (i) a heavy chain variable domain of a third immunoglobulin (VH-3) that is capable of specifically binding to a third epitope; (ii) a second CH1 domain of the third immunoglobulin (CH1-3); and (iii) a second heterodimerization domain of the third immunoglobulin, wherein the second heterodimerization domain comprises an amino acid sequence or a nucleic acid sequence that is distinct from the first heterodimerization domain of the first immunoglobulin, wherein the second heterodimerization domain is incapable of forming a stable homodimer with another second heterodimerization domain, and wherein the second heterodimerization domain of the third immunoglobulin is configured to form a heterodimer with the first heterodimerization domain of the first immunoglobulin; (d) the fourth polypeptide comprises in the N-terminal to C-terminal direction: (i) a light chain variable domain of the third immunoglobulin (VL-3) that is capable of specifically binding to the third epitope; and (ii) a light chain constant domain of the third immunoglobulin (CL-3); and wherein each of VL-1 and VL-3 independently comprises the CDR1 sequence, the CDR2 sequence and the CDR3 sequence of a V_{L} amino acid sequence selected from any one of SEQ ID NOs: 1, 9, 17, 25, 33, 41, 49, 57, 65, 73, 81, 89, 97, 105, 113, 121, 129, 145, 153, 161, 169, 177, 193, 201, 233, 241, 257, 273, 281, 289, 297, 305, 313, 321, 329, 337, 345, 353, 361, 369, 377, 385, 393, 401, 409, 417, 425, 433, 441, 449, 457, 465, 481, 489, 497, 521, 529, 537, 545, 553, 561, 609, 617, 681, 689, 697, 705, 713, 721, 729, 737, 745, 753, 761, 769, 777, 785, 793, 801, 809, 817, 825, 833, 841, 849, 857, 865, 873, 881, 889, 945, 953, 961, 977, 985, 993, 1001, 1009, 1017, 1025, 1033, 1041, 1049, 1065, 1073, 1081, 1089, 1097, 1105, 1113, 1121, 1129, 1137, 1145, 1153, 1161, 1169, 1177, 1185, 1193, 1201, 1209, 1217, 1225, 1233, 1241, 1249, 1257, 1265, 1273, 1281, 1289, 1297, 1305, 1313, 1321, 1329, 1337, 1345, 1353, 1361, 1369, 1377, 1385, 1393, 1401, 1409, 1417, 1425, 1433, 1441, 1449, 1457, 1465, 1473, 1481, 1489, 1497, 1505, 1513, 1521, 1529, 1545, 1553, 1561, 1569, 1577, 1585, 1593, 1601, 1609, 1617, 1625, 1633, 1649, 1657, 1673, 1681, 1689, 1697, 1705, 1713, 1721, 1729, 1737, 1745, 1753, 1761, 1769, 1777, 1785, 1793, 1801, 1809, 1817, 1833, 1841, 1849, 1857, 1865, 1873, 1881, 1889, 1913, 1937, 1945, 1953, 1961, 1969, 1977, 1985, 1993, 2001, 2009, 2017, 2025, 2033, 2041, 2049, 2057, 2065, 2073, 2081, 2089, 2097, 2105, 2113, 2121, 2129, 2137, 2145, 2153, 2161, 2169, 2177, 2185, 2193, 2201, 2209, 2217, 2225, 2233, 2241, 2249, 2257, 2265, 2273, 2281, 2297, 2305, 2313, 2321, 2329, 2337 and 2345; and/or wherein each of VH-1 and VH-3 independently comprises the CDR1 sequence, the CDR2 sequence and the CDR3 sequence of a V_{H} amino acid sequence selected from any one of SEQ ID NOs: 5, 13, 21, 29, 37, 45, 53, 61, 69, 77, 85, 93, 101, 109, 117, 125, 133, 149, 157, 165, 173, 181, 197, 205, 237, 245, 261, 277, 285, 293, 301, 309, 317, 325, 333, 341, 349, 357, 365, 373, 381, 389, 397, 405, 413, 421, 429, 437, 445, 453, 461, 469, 485, 493, 501, 525, 533, 541, 549, 557, 565, 613, 621, 685, 693, 701, 709, 717, 725, 733, 741, 749, 757, 765, 773, 781, 789, 797, 805, 813, 821, 829, 837, 845, 853, 861, 869, 877, 885, 893, 949, 957, 965, 981, 989, 997, 1005, 1013, 1021, 1029, 1037, 1045, 1053, 1069, 1077, 1085, 1093, 1101, 1109, 1117, 1125, 1133, 1141, 1149, 1157, 1165, 1173, 1181, 1189, 1197, 1205, 1213, 1221, 1229, 1237, 1245, 1253, 1261, 1269, 1277, 1285, 1293, 1301, 1309, 1317, 1325, 1333, 1341, 1349, 1357, 1365, 1373, 1381, 1389, 1397, 1405, 1413, 1421, 1429, 1437, 1445, 1453, 1461, 1469, 1477, 1485, 1493, 1501, 1509, 1517, 1525, 1533, 1549, 1557, 1565, 1573, 1581, 1589, 1597, 1605, 1613, 1621, 1629, 1637, 1653, 1661, 1677, 1685, 1693, 1701, 1709, 1717, 1725, 1733, 1741, 1749, 1757, 1765, 1773, 1781, 1789, 1797, 1805, 1813, 1821, 1837, 1845, 1853, 1861, 1869, 1877, 1885, 1893, 1917, 1941, 1949, 1957, 1965, 1973, 1981, 1989, 1997, 2005, 2013, 2021, 2029, 2037, 2045, 2053, 2061, 2069, 2077, 2085, 2093, 2101, 2109, 2117, 2125, 2133, 2141, 2149, 2157, 2165, 2173, 2181, 2189, 2197, 2205, 2213, 2221, 2229, 2237, 2245, 2253, 2261, 2269, 2277, 2285, 2301, 2309, 2317, 2325, 2333, 2341, and 2349; and/or wherein VL-2 comprises the CDR1 sequence, the CDR2 sequence and the CDR3 sequence of a V_{L} amino acid sequence selected from any one of SEQ ID NOs: 17, 25, 33, 41, 121, 137, 169, 177, 185, 193, 201, 209, 217, 225, 233, 241, 249, 257, 265, 321, 329, 337, 393, 401, 409, 473, 481, 489, 497, 505, 513, 545, 553, 561, 569, 577, 585, 593, 601, 625, 633, 641, 649, 657, 665, 673, 681, 689, 697, 705, 713, 721, 729, 737, 745, 753, 761, 769, 785, 793, 801, 809, 817, 849, 857, 865, 873, 881, 889, 897, 905, 913, 921, 929, 937, 945, 969, 977, 1009, 1057, 1537, 1569, 1601, 1641, 1665, 1825, 1865, 1897, 1905, 1913, 1921, 1929, 2265, 2281 2289, 2329, and 2345; and/or wherein VH-2 comprises the CDR1 sequence, the CDR2 sequence and the CDR3 sequence of a V_{H} amino acid sequence selected from any one of SEQ ID NOs: 21, 29, 37, 45, 125, 141, 173, 181, 189, 197, 205, 213, 221, 229, 237, 245, 253, 261, 269, 325, 333, 341, 397, 405, 413, 477, 485, 493, 501, 509, 517, 549, 557, 565, 573, 581, 589, 597, 605, 629, 637, 645, 653, 661, 669, 677, 685, 693, 701, 709, 717, 725, 733, 741, 749, 757, 765, 773, 789, 797, 805, 813, 821, 853, 861, 869, 877, 885, 893, 901, 909, 917, 925, 933, 941, 949, 973, 981, 1013, 1061, 1541, 1573, 1605, 1645, 1669, 1829, 1869, 1901, 1909, 1917, 1925, 1933, 2269, 2285, 2293, 2333, and 2349.

[0012] Additionally or alternatively, in some embodiments of the heterodimeric multispecific antibodies disclosed herein, VH-1 or VH-3 comprises an amino acid sequence that is at least 80%, at least 85%, at least 90%, at least 95%, at least 99% or 100% identical to a V_{H} amino acid sequence selected from any one of SEQ ID NOs: 5, 13, 21, 29, 37, 45, 53, 61, 69, 77, 85, 93, 101, 109, 117, 125, 133, 149, 157, 165, 173, 181, 197, 205, 237, 245, 261, 277, 285, 293, 301, 309, 317, 325, 333, 341, 349, 357, 365, 373, 381, 389, 397, 405, 413, 421, 429, 437, 445, 453, 461, 469, 485, 493, 501, 525, 533, 541, 549, 557, 565, 613, 621, 685, 693, 701, 709, 717, 725, 733, 741, 749, 757, 765, 773, 781, 789, 797, 805, 813, 821, 829, 837, 845, 853, 861, 869, 877, 885, 893, 949, 957, 965, 981, 989, 997, 1005, 1013, 1021, 1029, 1037, 1045, 1053, 1069, 1077, 1085, 1093, 1101, 1109, 1117, 1125, 1133, 1141, 1149, 1157, 1165, 1173, 1181, 1189, 1197, 1205, 1213, 1221, 1229, 1237, 1245, 1253, 1261, 1269, 1277, 1285, 1293, 1301, 1309, 1317, 1325, 1333, 1341, 1349, 1357, 1365, 1373, 1381, 1389, 1397, 1405, 1413, 1421, 1429, 1437, 1445, 1453, 1461, 1469, 1477, 1485, 1493, 1501, 1509, 1517, 1525, 1533, 1549, 1557, 1565, 1573, 1581, 1589, 1597, 1605, 1613, 1621, 1629, 1637, 1653, 1661, 1677, 1685, 1693, 1701, 1709, 1717, 1725, 1733, 1741, 1749, 1757, 1765, 1773, 1781, 1789, 1797, 1805, 1813, 1821, 1837, 1845, 1853, 1861, 1869, 1877, 1885, 1893, 1917, 1941, 1949, 1957, 1965, 1973, 1981, 1989, 1997, 2005, 2013, 2021, 2029, 2037, 2045, 2053, 2061, 2069, 2077, 2085, 2093, 2101, 2109, 2117, 2125, 2133, 2141, 2149, 2157, 2165, 2173, 2181, 2189, 2197, 2205, 2213, 2221, 2229, 2237, 2245, 2253, 2261, 2269, 2277, 2285, 2301, 2309, 2317, 2325, 2333, 2341, and 2349; and/or the VL-1 or VL-3 comprises an amino acid sequence that is at least 80%, at least 85%, at least 90%, at least 95%, at least 99% or 100% identical to a V_{L} amino acid sequence selected from any one of SEQ ID NOs: 1, 9, 17, 25, 33, 41, 49, 57, 65, 73, 81, 89, 97, 105, 113, 121, 129, 145, 153, 161, 169, 177, 193, 201, 233, 241, 257, 273, 281, 289, 297, 305, 313, 321, 329, 337, 345, 353, 361, 369, 377, 385, 393, 401, 409, 417, 425, 433, 441, 449, 457, 465, 481, 489, 497, 521, 529, 537, 545, 553, 561, 609, 617, 681, 689, 697, 705, 713, 721, 729, 737, 745, 753, 761, 769, 777, 785, 793, 801, 809, 817, 825, 833, 841, 849, 857, 865, 873, 881, 889, 945, 953, 961, 977, 985, 993, 1001, 1009, 1017, 1025, 1033, 1041, 1049, 1065, 1073, 1081, 1089, 1097, 1105, 1113, 1121, 1129, 1137, 1145, 1153, 1161, 1169, 1177, 1185, 1193, 1201, 1209, 1217, 1225, 1233, 1241, 1249, 1257, 1265, 1273, 1281, 1289, 1297, 1305, 1313, 1321, 1329, 1337, 1345, 1353, 1361, 1369, 1377, 1385, 1393, 1401, 1409, 1417, 1425, 1433, 1441, 1449, 1457, 1465, 1473, 1481, 1489, 1497, 1505, 1513, 1521, 1529, 1545, 1553, 1561, 1569, 1577, 1585, 1593, 1601, 1609, 1617, 1625, 1633, 1649, 1657, 1673, 1681, 1689, 1697, 1705, 1713, 1721, 1729, 1737, 1745, 1753, 1761, 1769, 1777, 1785, 1793, 1801, 1809, 1817, 1833, 1841, 1849, 1857, 1865, 1873, 1881, 1889, 1913, 1937, 1945, 1953, 1961, 1969, 1977, 1985, 1993, 2001, 2009, 2017, 2025, 2033, 2041, 2049, 2057, 2065, 2073, 2081, 2089, 2097, 2105, 2113, 2121, 2129, 2137, 2145, 2153, 2161, 2169, 2177, 2185, 2193, 2201, 2209, 2217, 2225, 2233, 2241, 2249, 2257, 2265, 2273, 2281, 2297, 2305, 2313, 2321, 2329, 2337 and 2345.

[0013] Additionally or alternatively, in some embodiments of the heterodimeric multispecific antibodies disclosed herein, VH-2 or VH-4 comprises an amino acid sequence that is at least 80%, at least 85%, at least 90%, at least 95%, at least 99% or 100% identical to a V_{H} amino acid sequence selected from any one of SEQ ID NOs: 21, 29, 37, 45, 125, 141, 173, 181, 189, 197, 205, 213, 221, 229, 237, 245, 253, 261, 269, 325, 333, 341, 397, 405, 413, 477, 485, 493, 501, 509, 517, 549, 557, 565, 573, 581, 589, 597, 605, 629, 637, 645, 653, 661, 669, 677, 685, 693, 701, 709, 717, 725, 733, 741, 749, 757, 765, 773, 789, 797, 805, 813, 821, 853, 861, 869, 877, 885, 893, 901, 909, 917, 925, 933, 941, 949, 973, 981, 1013, 1061, 1541, 1573, 1605, 1645, 1669, 1829, 1869, 1901, 1909, 1917, 1925, 1933, 2269, 2285, 2293, 2333, and 2349; and/or VL-2 or VL-4 comprises an amino acid sequence that is at least 80%, at least 85%, at least 90%, at least 95%, at least 99%, or 100% identical to a VL amino acid sequence selected from any one of SEQ ID NOs: 17, 25, 33, 41, 121, 137, 169, 177, 185, 193, 201, 209, 217, 225, 233, 241, 249, 257, 265, 321, 329, 337, 393, 401, 409, 473, 481, 489, 497, 505, 513, 545, 553, 561, 569, 577, 585, 593, 601, 625, 633, 641, 649, 657, 665, 673, 681, 689, 697, 705, 713, 721, 729, 737, 745, 753, 761, 769, 785, 793, 801, 809, 817, 849, 857, 865, 873, 881, 889, 897, 905, 913, 921, 929, 937, 945, 969, 977, 1009, 1057, 1537, 1569, 1601, 1641, 1665, 1825, 1865, 1897, 1905, 1913, 1921, 1929, 2265, 2281 2289, 2329, and 2345.

[0014] Additionally or alternatively, in some embodiments of the heterodimeric multispecific antibodies disclosed herein, each of VL-1 and VH-1 comprise a V_{L} amino acid sequence and a V_{H} amino acid sequence selected from the group consisting of SEQ ID NOs: 1 and 5 respectively; SEQ ID NOs: 9 and 13 respectively; SEQ ID NOs: 17 and 21 respectively; SEQ ID NOs: 25 and 29 respectively; SEQ ID NOs: 33 and 37 respectively; SEQ ID NOs: 41 and 45 respectively; SEQ ID NOs: 49 and 53 respectively; SEQ ID NOs: 57 and 61 respectively; SEQ ID NOs: 73 and 77 respectively; SEQ ID NOs: 89 and 93 respectively; SEQ ID NOs: 97 and 101 respectively; SEQ ID NOs: 105 and 109 respectively; SEQ ID NOs: 113 and 117 respectively; SEQ ID NOs: 121 and 125 respectively; SEQ ID NOs: 129 and 133 respectively; SEQ ID NOs: 145 and 149 respectively; SEQ ID NOs: 161 and 165 respectively; SEQ ID NOs: 169 and 173 respectively; SEQ ID NOs: 177 and 181 respectively; SEQ ID NOs: 193 and 197 respectively; SEQ ID NOs: 201 and 205 respectively; SEQ ID NOs: 233 and 237 respectively; SEQ ID NOs: 241 and 245 respectively; SEQ ID NOs: 257 and 261 respectively; SEQ ID NOs: 273 and 277 respectively; SEQ ID NOs: 281 and 285 respectively; SEQ ID NOs: 289 and 293 respectively; SEQ ID NOs: 297 and 301 respectively; SEQ ID NOs: 305 and 309 respectively; SEQ ID NOs: 313 and 317 respectively; SEQ ID NOs: 321 and 325 respectively; SEQ ID NOs: 329 and 333 respectively; SEQ ID NOs: 337 and 341 respectively; SEQ ID NOs: 345 and 349 respectively; SEQ ID NOs: 353 and 357 respectively; SEQ ID NOs: 361 and 365 respectively; SEQ ID NOs: 369 and 373 respectively; SEQ ID NOs: 377 and 381 respectively; SEQ ID NOs: 385 and 389 respectively; SEQ ID NOs: 393 and 397 respectively; SEQ ID NOs: 401 and 405 respectively; SEQ ID NOs: 409 and 413 respectively; SEQ ID NOs: 417 and 421 respectively; SEQ ID NOs: 425 and 429 respectively; SEQ ID NOs: 433 and 437 respectively; SEQ ID NOs: 441 and 445 respectively; SEQ ID NOs: 449 and 453 respectively; SEQ ID NOs: 457 and 461 respectively; SEQ ID NOs: 465 and 469 respectively; SEQ ID NOs: 481 and 485 respectively; SEQ ID NOs: 489 and 493 respectively; SEQ ID NOs: 497 and 501 respectively; SEQ ID NOs: 521 and 525 respectively; SEQ ID NOs: 529 and 533 respectively; SEQ ID NOs: 537 and 541 respectively; SEQ ID NOs: 545 and 549 respectively; SEQ ID NOs: 553 and 557 respectively; SEQ ID NOs: 561 and 565 respectively; SEQ ID NOs: 609 and 613 respectively; SEQ ID NOs: 617 and 621 respectively; SEQ ID NOs: 681 and 685 respectively; SEQ ID NOs: 689 and 693 respectively; SEQ ID NOs: 697 and 701 respectively; SEQ ID NOs: 705 and 709 respectively; SEQ ID NOs: 713 and 717 respectively; SEQ ID NOs: 721 and 725 respectively; SEQ ID NOs: 729 and 733 respectively; SEQ ID NOs: 737 and 741 respectively; SEQ ID NOs: 745 and 749 respectively; SEQ ID NOs: 753 and 757 respectively; SEQ ID NOs: 761 and 765 respectively; SEQ ID NOs: 769 and 773 respectively; SEQ ID NOs: 785 and 789 respectively; SEQ ID NOs: 793 and 797 respectively; SEQ ID NOs: 801 and 805 respectively; SEQ ID NOs: 809 and 813 respectively; SEQ ID NOs: 817 and 821 respectively; SEQ ID NOs: 825 and 829 respectively; SEQ ID NOs: 833 and 837 respectively; SEQ ID NOs: 841 and 845 respectively; SEQ ID NOs: 849 and 853 respectively; SEQ ID NOs: 857 and 861 respectively; SEQ ID NOs: 865 and 869 respectively; SEQ ID NOs: 873 and 877 respectively; SEQ ID NOs: 881 and 885 respectively; SEQ ID NOs: 889 and 893 respectively; SEQ ID NOs: 945 and 949 respectively; SEQ ID NOs: 953 and 957 respectively; SEQ ID NOs: 961 and 965 respectively; SEQ ID NOs: 977 and 981 respectively; SEQ ID NOs: 985 and 989 respectively; SEQ ID NOs: 993 and 997 respectively; SEQ ID NOs: 1001 and 1005 respectively; SEQ ID NOs: 1009 and 1013 respectively; SEQ ID NOs: 1017 and 1021 respectively; SEQ ID NOs: 1025 and 1029 respectively; SEQ ID NOs: 1033 and 1037 respectively; SEQ ID NOs: 1041 and 1045 respectively; SEQ ID NOs: 1065 and 1069 respectively; SEQ ID NOs: 1073 and 1077 respectively; SEQ ID NOs: 1081 and 1085 respectively; SEQ ID NOs: 1089 and 1093 respectively; SEQ ID NOs: 1097 and 1101 respectively; SEQ ID NOs: 1113 and 1117 respectively; SEQ ID NOs: 1121 and 1125 respectively; SEQ ID NOs: 1129 and 1133 respectively; SEQ ID NOs: 1137 and 1141 respectively; SEQ ID NOs: 1145 and 1149 respectively; SEQ ID NOs: 1153 and 1157 respectively; SEQ ID NOs: 1161 and 1165 respectively; SEQ ID NOs: 1169 and 1173 respectively; SEQ ID NOs: 1185 and 1189 respectively; SEQ ID NOs: 1193 and 1197 respectively; SEQ ID NOs: 1201 and 1205 respectively; SEQ ID NOs: 1209 and 1213 respectively; SEQ ID NOs: 1217 and 1221 respectively; SEQ ID NOs: 1225 and 1229 respectively; SEQ ID NOs: 1233 and 1237 respectively; SEQ ID NOs: 1241 and 1245 respectively; SEQ ID NOs: 1249 and 1253 respectively; SEQ ID NOs: 1257 and 1261 respectively; SEQ ID NOs: 1265 and 1269 respectively; SEQ ID NOs: 1273 and 1277 respectively; SEQ ID NOs: 1281 and 1285 respectively; SEQ ID NOs: 1289 and 1293 respectively; SEQ ID NOs: 1297 and 1301 respectively; SEQ ID NOs: 1305 and 1309 respectively; SEQ ID NOs: 1313 and 1317 respectively; SEQ ID NOs: 1321 and 1325 respectively; SEQ ID NOs: 1329 and 1333 respectively; SEQ ID NOs: 1337 and 1341 respectively; SEQ ID NOs: 1345 and 1349 respectively; SEQ ID NOs: 1353 and 1357 respectively; SEQ ID NOs: 1361 and 1365 respectively; SEQ ID NOs: 1369 and 1373 respectively; SEQ ID NOs: 1377 and 1381 respectively; SEQ ID NOs: 1385 and 1389 respectively; SEQ ID NOs: 1393 and 1397 respectively; SEQ ID NOs: 1401 and 1405 respectively; SEQ ID NOs: 1409 and 1413 respectively; SEQ ID NOs: 1417 and 1421 respectively; SEQ ID NOs: 1433 and 1437 respectively; SEQ ID NOs: 1441 and 1445 respectively; SEQ ID NOs: 1457 and 1461 respectively; SEQ ID NOs: 1465 and 1469 respectively; SEQ ID NOs: 1473 and 1477 respectively; SEQ ID NOs: 1481 and 1485 respectively; SEQ ID NOs: 1489 and 1493 respectively; SEQ ID NOs: 1497 and 1501 respectively; SEQ ID NOs: 1505 and 1509 respectively; SEQ ID NOs: 1513 and 1517 respectively; SEQ ID NOs: 1521 and 1525 respectively; SEQ ID NOs: 1529 and 1533 respectively; SEQ ID NOs: 1545 and 1549 respectively; SEQ ID NOs: 1553 and 1557 respectively; SEQ ID NOs: 1561 and 1565 respectively; SEQ ID NOs: 1569 and 1573 respectively; SEQ ID NOs: 1577 and 1581 respectively; SEQ ID NOs: 1585 and 1589 respectively; SEQ ID NOs: 1593 and 1597 respectively; SEQ ID NOs: 1601 and 1605 respectively; SEQ ID NOs: 1609 and 1613 respectively; SEQ ID NOs: 1617 and 1621 respectively; SEQ ID NOs: 1625 and 1629 respectively; SEQ ID NOs: 1633 and 1637 respectively; SEQ ID NOs: 1649 and 1653 respectively; SEQ ID NOs: 1657 and 1661 respectively; SEQ ID NOs: 1673 and 1677 respectively; SEQ ID NOs: 1681 and 1685 respectively; SEQ ID NOs: 1689 and 1693 respectively; SEQ ID NOs: 1697 and 1701 respectively; SEQ ID NOs: 1705 and 1709 respectively; SEQ ID NOs: 1713 and 1717 respectively; SEQ ID NOs: 1721 and 1725 respectively; SEQ ID NOs: 1729 and 1733 respectively; SEQ ID NOs: 1737 and 1741 respectively; SEQ ID NOs: 1745 and 1749 respectively; SEQ ID NOs: 1753 and 1757 respectively; SEQ ID NOs: 1761 and 1765 respectively; SEQ ID NOs: 1769 and 1773 respectively; SEQ ID NOs: 1777 and 1781 respectively; SEQ ID NOs: 1785 and 1789 respectively; SEQ ID NOs: 1793 and 1797 respectively; SEQ ID NOs: 1801 and 1805 respectively; SEQ ID NOs: 1809 and 1813 respectively; SEQ ID NOs: 1817 and 1821 respectively; SEQ ID NOs: 1833 and 1837 respectively; SEQ ID NOs: 1841 and 1845 respectively; SEQ ID NOs: 1849 and 1853 respectively; SEQ ID NOs: 1857 and 1861 respectively; SEQ ID NOs: 1865 and 1869 respectively; SEQ ID NOs: 1873 and 1877 respectively; SEQ ID NOs: 1881 and 1885 respectively; SEQ ID NOs: 1889 and 1893 respectively; SEQ ID NOs: 1913 and 1917 respectively; SEQ ID NOs: 1937 and 1941 respectively; SEQ ID NOs: 1945 and 1949 respectively; SEQ ID NOs: 1953 and 1957 respectively; SEQ ID NOs: 1961 and 1965 respectively; SEQ ID NOs: 1969 and 1973 respectively; SEQ ID NOs: 1977 and 1981 respectively; SEQ ID NOs: 1985 and 1989 respectively; SEQ ID NOs: 1993 and 1997 respectively; SEQ ID NOs: 2001 and 2005 respectively; SEQ ID NOs: 2009 and 2013 respectively; SEQ ID NOs: 2017 and 2021 respectively; SEQ ID NOs: 2025 and 2029 respectively; SEQ ID NOs: 2033 and 2037 respectively; SEQ ID NOs: 2041 and 2045 respectively; SEQ ID NOs: 2049 and 2053 respectively; SEQ ID NOs: 2057 and 2061 respectively; SEQ ID NOs: 2065 and 2069 respectively; SEQ ID NOs: 2073 and 2077 respectively; SEQ ID NOs: 2081 and 2085 respectively; SEQ ID NOs: 2089 and 2093 respectively; SEQ ID NOs: 2097 and 2101 respectively; SEQ ID NOs: 2105 and 2109 respectively; SEQ ID NOs: 2113 and 2117 respectively; SEQ ID NOs: 2121 and 2125 respectively; SEQ ID NOs: 2129 and 2133 respectively; SEQ ID NOs: 2137 and 2141 respectively; SEQ ID NOs: 2145 and 2149 respectively; SEQ ID NOs: 2153 and 2157 respectively; SEQ ID NOs: 2161 and 2165 respectively; SEQ ID NOs: 2169 and 2173 respectively; SEQ ID NOs: 2177 and 2181 respectively; SEQ ID NOs: 2185 and 2189 respectively; SEQ ID NOs: 2193 and 2197 respectively; SEQ ID NOs: 2201 and 2205 respectively; SEQ ID NOs: 2209 and 2213 respectively; SEQ ID NOs: 2217 and 2221 respectively; SEQ ID NOs: 2225 and 2229 respectively; SEQ ID NOs: 2233 and 2237 respectively; SEQ ID NOs: 2241 and 2245 respectively; SEQ ID NOs: 2249 and 2253 respectively; SEQ ID NOs: 2257 and 2261 respectively; SEQ ID NOs: 2273 and 2277 respectively; SEQ ID NOs: 2281 and 2285 respectively; SEQ ID NOs: 2305 and 2309 respectively; SEQ ID NOs: 2313 and 2317 respectively; SEQ ID NOs: 2321 and 2325 respectively; SEQ ID NOs: 2329 and 2333 respectively; SEQ ID NOs: 2337 and 2341 respectively; and SEQ ID NOs: 2345 and 2349 respectively.

[0015] Additionally or alternatively, in some embodiments of the heterodimeric multispecific antibodies disclosed herein, each of VL-3 and VH-3 comprise a V_{L} amino acid sequence and a V_{H} amino acid sequence selected from the group consisting of SEQ ID NOs: 1 and 5 respectively; SEQ ID NOs: 9 and 13 respectively; SEQ ID NOs: 17 and 21 respectively; SEQ ID NOs: 25 and 29 respectively; SEQ ID NOs: 33 and 37 respectively; SEQ ID NOs: 41 and 45 respectively; SEQ ID NOs: 49 and 53 respectively; SEQ ID NOs: 57 and 61 respectively; SEQ ID NOs: 73 and 77 respectively; SEQ ID NOs: 89 and 93 respectively; SEQ ID NOs: 97 and 101 respectively; SEQ ID NOs: 105 and 109 respectively; SEQ ID NOs: 113 and 117 respectively; SEQ ID NOs: 121 and 125 respectively; SEQ ID NOs: 129 and 133 respectively; SEQ ID NOs: 145 and 149 respectively; SEQ ID NOs: 161 and 165 respectively; SEQ ID NOs: 169 and 173 respectively; SEQ ID NOs: 177 and 181 respectively; SEQ ID NOs: 193 and 197 respectively; SEQ ID NOs: 201 and 205 respectively; SEQ ID NOs: 233 and 237 respectively; SEQ ID NOs: 241 and 245 respectively; SEQ ID NOs: 257 and 261 respectively; SEQ ID NOs: 273 and 277 respectively; SEQ ID NOs: 281 and 285 respectively; SEQ ID NOs: 289 and 293 respectively; SEQ ID NOs: 297 and 301 respectively; SEQ ID NOs: 305 and 309 respectively; SEQ ID NOs: 313 and 317 respectively; SEQ ID NOs: 321 and 325 respectively; SEQ ID NOs: 329 and 333 respectively; SEQ ID NOs: 337 and 341 respectively; SEQ ID NOs: 345 and 349 respectively; SEQ ID NOs: 353 and 357 respectively; SEQ ID NOs: 361 and 365 respectively; SEQ ID NOs: 369 and 373 respectively; SEQ ID NOs: 377 and 381 respectively; SEQ ID NOs: 385 and 389 respectively; SEQ ID NOs: 393 and 397 respectively; SEQ ID NOs: 401 and 405 respectively; SEQ ID NOs: 409 and 413 respectively; SEQ ID NOs: 417 and 421 respectively; SEQ ID NOs: 425 and 429 respectively; SEQ ID NOs: 433 and 437 respectively; SEQ ID NOs: 441 and 445 respectively; SEQ ID NOs: 449 and 453 respectively; SEQ ID NOs: 457 and 461 respectively; SEQ ID NOs: 465 and 469 respectively; SEQ ID NOs: 481 and 485 respectively; SEQ ID NOs: 489 and 493 respectively; SEQ ID NOs: 497 and 501 respectively; SEQ ID NOs: 521 and 525 respectively; SEQ ID NOs: 529 and 533 respectively; SEQ ID NOs: 537 and 541 respectively; SEQ ID NOs: 545 and 549 respectively; SEQ ID NOs: 553 and 557 respectively; SEQ ID NOs: 561 and 565 respectively; SEQ ID NOs: 609 and 613 respectively; SEQ ID NOs: 617 and 621 respectively; SEQ ID NOs: 681 and 685 respectively; SEQ ID NOs: 689 and 693 respectively; SEQ ID NOs: 697 and 701 respectively; SEQ ID NOs: 705 and 709 respectively; SEQ ID NOs: 713 and 717 respectively; SEQ ID NOs: 721 and 725 respectively; SEQ ID NOs: 729 and 733 respectively; SEQ ID NOs: 737 and 741 respectively; SEQ ID NOs: 745 and 749 respectively; SEQ ID NOs: 753 and 757 respectively; SEQ ID NOs: 761 and 765 respectively; SEQ ID NOs: 769 and 773 respectively; SEQ ID NOs: 785 and 789 respectively; SEQ ID NOs: 793 and 797 respectively; SEQ ID NOs: 801 and 805 respectively; SEQ ID NOs: 809 and 813 respectively; SEQ ID NOs: 817 and 821 respectively; SEQ ID NOs: 825 and 829 respectively; SEQ ID NOs: 833 and 837 respectively; SEQ ID NOs: 841 and 845 respectively; SEQ ID NOs: 849 and 853 respectively; SEQ ID NOs: 857 and 861 respectively; SEQ ID NOs: 865 and 869 respectively; SEQ ID NOs: 873 and 877 respectively; SEQ ID NOs: 881 and 885 respectively; SEQ ID NOs: 889 and 893 respectively; SEQ ID NOs: 945 and 949 respectively; SEQ ID NOs: 953 and 957 respectively; SEQ ID NOs: 961 and 965 respectively; SEQ ID NOs: 977 and 981 respectively; SEQ ID NOs: 985 and 989 respectively; SEQ ID NOs: 993 and 997 respectively; SEQ ID NOs: 1001 and 1005 respectively; SEQ ID NOs: 1009 and 1013 respectively; SEQ ID NOs: 1017 and 1021 respectively; SEQ ID NOs: 1025 and 1029 respectively; SEQ ID NOs: 1033 and 1037 respectively; SEQ ID NOs: 1041 and 1045 respectively; SEQ ID NOs: 1065 and 1069 respectively; SEQ ID NOs: 1073 and 1077 respectively; SEQ ID NOs: 1081 and 1085 respectively; SEQ ID NOs: 1089 and 1093 respectively; SEQ ID NOs: 1097 and 1101 respectively; SEQ ID NOs: 1113 and 1117 respectively; SEQ ID NOs: 1121 and 1125 respectively; SEQ ID NOs: 1129 and 1133 respectively; SEQ ID NOs: 1137 and 1141 respectively; SEQ ID NOs: 1145 and 1149 respectively; SEQ ID NOs: 1153 and 1157 respectively; SEQ ID NOs: 1161 and 1165 respectively; SEQ ID NOs: 1169 and 1173 respectively; SEQ ID NOs: 1185 and 1189 respectively; SEQ ID NOs: 1193 and 1197 respectively; SEQ ID NOs: 1201 and 1205 respectively; SEQ ID NOs: 1209 and 1213 respectively; SEQ ID NOs: 1217 and 1221 respectively; SEQ ID NOs: 1225 and 1229 respectively; SEQ ID NOs: 1233 and 1237 respectively; SEQ ID NOs: 1241 and 1245 respectively; SEQ ID NOs: 1249 and 1253 respectively; SEQ ID NOs: 1257 and 1261 respectively; SEQ ID NOs: 1265 and 1269 respectively; SEQ ID NOs: 1273 and 1277 respectively; SEQ ID NOs: 1281 and 1285 respectively; SEQ ID NOs: 1289 and 1293 respectively; SEQ ID NOs: 1297 and 1301 respectively; SEQ ID NOs: 1305 and 1309 respectively; SEQ ID NOs: 1313 and 1317 respectively; SEQ ID NOs: 1321 and 1325 respectively; SEQ ID NOs: 1329 and 1333 respectively; SEQ ID NOs: 1337 and 1341 respectively; SEQ ID NOs: 1345 and 1349 respectively; SEQ ID NOs: 1353 and 1357 respectively; SEQ ID NOs: 1361 and 1365 respectively; SEQ ID NOs: 1369 and 1373 respectively; SEQ ID NOs: 1377 and 1381 respectively; SEQ ID NOs: 1385 and 1389 respectively; SEQ ID NOs: 1393 and 1397 respectively; SEQ ID NOs: 1401 and 1405 respectively; SEQ ID NOs: 1409 and 1413 respectively; SEQ ID NOs: 1417 and 1421 respectively; SEQ ID NOs: 1433 and 1437 respectively; SEQ ID NOs: 1441 and 1445 respectively; SEQ ID NOs: 1457 and 1461 respectively; SEQ ID NOs: 1465 and 1469 respectively; SEQ ID NOs: 1473 and 1477 respectively; SEQ ID NOs: 1481 and 1485 respectively; SEQ ID NOs: 1489 and 1493 respectively; SEQ ID NOs: 1497 and 1501 respectively; SEQ ID NOs: 1505 and 1509 respectively; SEQ ID NOs: 1513 and 1517 respectively; SEQ ID NOs: 1521 and 1525 respectively; SEQ ID NOs: 1529 and 1533 respectively; SEQ ID NOs: 1545 and 1549 respectively; SEQ ID NOs: 1553 and 1557 respectively; SEQ ID NOs: 1561 and 1565 respectively; SEQ ID NOs: 1569 and 1573 respectively; SEQ ID NOs: 1577 and 1581 respectively; SEQ ID NOs: 1585 and 1589 respectively; SEQ ID NOs: 1593 and 1597 respectively; SEQ ID NOs: 1601 and 1605 respectively; SEQ ID NOs: 1609 and 1613 respectively; SEQ ID NOs: 1617 and 1621 respectively; SEQ ID NOs: 1625 and 1629 respectively; SEQ ID NOs: 1633 and 1637 respectively; SEQ ID NOs: 1649 and 1653 respectively; SEQ ID NOs: 1657 and 1661 respectively; SEQ ID NOs: 1673 and 1677 respectively; SEQ ID NOs: 1681 and 1685 respectively; SEQ ID NOs: 1689 and 1693 respectively; SEQ ID NOs: 1697 and 1701 respectively; SEQ ID NOs: 1705 and 1709 respectively; SEQ ID NOs: 1713 and 1717 respectively; SEQ ID NOs: 1721 and 1725 respectively; SEQ ID NOs: 1729 and 1733 respectively; SEQ ID NOs: 1737 and 1741 respectively; SEQ ID NOs: 1745 and 1749 respectively; SEQ ID NOs: 1753 and 1757 respectively; SEQ ID NOs: 1761 and 1765 respectively; SEQ ID NOs: 1769 and 1773 respectively; SEQ ID NOs: 1777 and 1781 respectively; SEQ ID NOs: 1785 and 1789 respectively; SEQ ID NOs: 1793 and 1797 respectively; SEQ ID NOs: 1801 and 1805 respectively; SEQ ID NOs: 1809 and 1813 respectively; SEQ ID NOs: 1817 and 1821 respectively; SEQ ID NOs: 1833 and 1837 respectively; SEQ ID NOs: 1841 and 1845 respectively; SEQ ID NOs: 1849 and 1853 respectively; SEQ ID NOs: 1857 and 1861 respectively; SEQ ID NOs: 1865 and 1869 respectively; SEQ ID NOs: 1873 and 1877 respectively; SEQ ID NOs: 1881 and 1885 respectively; SEQ ID NOs: 1889 and 1893 respectively; SEQ ID NOs: 1913 and 1917 respectively; SEQ ID NOs: 1937 and 1941 respectively; SEQ ID NOs: 1945 and 1949 respectively; SEQ ID NOs: 1953 and 1957 respectively; SEQ ID NOs: 1961 and 1965 respectively; SEQ ID NOs: 1969 and 1973 respectively; SEQ ID NOs: 1977 and 1981 respectively; SEQ ID NOs: 1985 and 1989 respectively; SEQ ID NOs: 1993 and 1997 respectively; SEQ ID NOs: 2001 and 2005 respectively; SEQ ID NOs: 2009 and 2013 respectively; SEQ ID NOs: 2017 and 2021 respectively; SEQ ID NOs: 2025 and 2029 respectively; SEQ ID NOs: 2033 and 2037 respectively; SEQ ID NOs: 2041 and 2045 respectively; SEQ ID NOs: 2049 and 2053 respectively; SEQ ID NOs: 2057 and 2061 respectively; SEQ ID NOs: 2065 and 2069 respectively; SEQ ID NOs: 2073 and 2077 respectively; SEQ ID NOs: 2081 and 2085 respectively; SEQ ID NOs: 2089 and 2093 respectively; SEQ ID NOs: 2097 and 2101 respectively; SEQ ID NOs: 2105 and 2109 respectively; SEQ ID NOs: 2113 and 2117 respectively; SEQ ID NOs: 2121 and 2125 respectively; SEQ ID NOs: 2129 and 2133 respectively; SEQ ID NOs: 2137 and 2141 respectively; SEQ ID NOs: 2145 and 2149 respectively; SEQ ID NOs: 2153 and 2157 respectively; SEQ ID NOs: 2161 and 2165 respectively; SEQ ID NOs: 2169 and 2173 respectively; SEQ ID NOs: 2177 and 2181 respectively; SEQ ID NOs: 2185 and 2189 respectively; SEQ ID NOs: 2193 and 2197 respectively; SEQ ID NOs: 2201 and 2205 respectively; SEQ ID NOs: 2209 and 2213 respectively; SEQ ID NOs: 2217 and 2221 respectively; SEQ ID NOs: 2225 and 2229 respectively; SEQ ID NOs: 2233 and 2237 respectively; SEQ ID NOs: 2241 and 2245 respectively; SEQ ID NOs: 2249 and 2253 respectively; SEQ ID NOs: 2257 and 2261 respectively; SEQ ID NOs: 2273 and 2277 respectively; SEQ ID NOs: 2281 and 2285 respectively; SEQ ID NOs: 2305 and 2309 respectively; SEQ ID NOs: 2313 and 2317 respectively; SEQ ID NOs: 2321 and 2325 respectively; SEQ ID NOs: 2329 and 2333 respectively; SEQ ID NOs: 2337 and 2341 respectively; and SEQ ID NOs: 2345 and 2349 respectively.

[0016] Additionally or alternatively, in some embodiments of the heterodimeric multispecific antibodies disclosed herein, each of VL-1 and VH-1 comprise a V_{L} amino acid sequence and a V_{H} amino acid sequence selected from the group consisting of SEQ ID NOs: 9 and 13 respectively; SEQ ID NOs: 49 and 53 respectively; SEQ ID NOs: 57 and 61 respectively; SEQ ID NOs: 65 and 69 respectively; SEQ ID NOs: 81 and 85 respectively; SEQ ID NOs: 153 and 157 respectively; SEQ ID NOs: 161 and 165 respectively; SEQ ID NOs: 193 and 197 respectively; SEQ ID NOs: 201 and 205 respectively; SEQ ID NOs: 273 and 277 respectively; SEQ ID NOs: 281 and 285 respectively; SEQ ID NOs: 289 and 293 respectively; SEQ ID NOs: 297 and 301 respectively; SEQ ID NOs: 305 and 309 respectively; SEQ ID NOs: 313 and 317 respectively; SEQ ID NOs: 361 and 365 respectively; SEQ ID NOs: 377 and 381 respectively; SEQ ID NOs: 393 and 397 respectively; SEQ ID NOs: 401 and 405 respectively; SEQ ID NOs: 409 and 413 respectively; SEQ ID NOs: 417 and 421 respectively; SEQ ID NOs: 425 and 429 respectively; SEQ ID NOs: 433 and 437 respectively; SEQ ID NOs: 441 and 445 respectively; SEQ ID NOs: 449 and 453 respectively; SEQ ID NOs: 457 and 461 respectively; SEQ ID NOs: 465 and 469 respectively; SEQ ID NOs: 681 and 685 respectively; SEQ ID NOs: 689 and 693 respectively; SEQ ID NOs: 697 and 701 respectively; SEQ ID NOs: 705 and 709 respectively; SEQ ID NOs: 713 and 717 respectively; SEQ ID NOs: 721 and 725 respectively; SEQ ID NOs: 737 and 741 respectively; SEQ ID NOs: 745 and 749 respectively; SEQ ID NOs: 753 and 757 respectively; SEQ ID NOs: 761 and 765 respectively; SEQ ID NOs: 777 and 781 respectively; SEQ ID NOs: 825 and 829 respectively; SEQ ID NOs: 833 and 837 respectively; SEQ ID NOs: 841 and 845 respectively; SEQ ID NOs: 953 and 957 respectively; SEQ ID NOs: 961 and 965 respectively; SEQ ID NOs: 977 and 981 respectively; SEQ ID NOs: 993 and 997 respectively; SEQ ID NOs: 1001 and 1005 respectively; SEQ ID NOs: 1009 and 1013 respectively; SEQ ID NOs: 1017 and 1021 respectively; SEQ ID NOs: 1033 and 1037 respectively; SEQ ID NOs: 1049 and 1053 respectively; SEQ ID NOs: 1073 and 1077 respectively; SEQ ID NOs: 1081 and 1085 respectively; SEQ ID NOs: 1089 and 1093 respectively; SEQ ID NOs: 1105 and 1109 respectively; SEQ ID NOs: 1129 and 1133 respectively; SEQ ID NOs: 1137 and 1141 respectively; SEQ ID NOs: 1153 and 1157 respectively; SEQ ID NOs: 1161 and 1165 respectively; SEQ ID NOs: 1177 and 1181 respectively; SEQ ID NOs: 1225 and 1229 respectively; SEQ ID NOs: 1241 and 1245 respectively; SEQ ID NOs: 1257 and 1261 respectively; SEQ ID NOs: 1265 and 1269 respectively; SEQ ID NOs: 1297 and 1301 respectively; SEQ ID NOs: 1393 and 1397 respectively; SEQ ID NOs: 1409 and 1413 respectively; SEQ ID NOs: 1425 and 1429 respectively; SEQ ID NOs: 1441 and 1445 respectively; SEQ ID NOs: 1449 and 1453 respectively; SEQ ID NOs: 1457 and 1461 respectively; SEQ ID NOs: 1465 and 1469 respectively; SEQ ID NOs: 1473 and 1477 respectively; SEQ ID NOs: 1481 and 1485 respectively; SEQ ID NOs: 1497 and 1501 respectively; SEQ ID NOs: 1505 and 1509 respectively; SEQ ID NOs: 1513 and 1517 respectively; SEQ ID NOs: 1521 and 1525 respectively; SEQ ID NOs: 1529 and 1533 respectively; SEQ ID NOs: 1545 and 1549 respectively; SEQ ID NOs: 1553 and 1557 respectively; SEQ ID NOs: 1561 and 1565 respectively; SEQ ID NOs: 1569 and 1573 respectively; SEQ ID NOs: 1577 and 1581 respectively; SEQ ID NOs: 1585 and 1589 respectively; SEQ ID NOs: 1609 and 1613 respectively; SEQ ID NOs: 1617 and 1621 respectively; SEQ ID NOs: 1649 and 1653 respectively; SEQ ID NOs: 1657 and 1661 respectively; SEQ ID NOs: 1673 and 1677 respectively; SEQ ID NOs: 1689 and 1693 respectively; SEQ ID NOs: 1697 and 1701 respectively; SEQ ID NOs: 1705 and 1709 respectively; SEQ ID NOs: 1713 and 1717 respectively; SEQ ID NOs: 1721 and 1725 respectively; SEQ ID NOs: 1729 and 1733 respectively; SEQ ID NOs: 1745 and 1749 respectively; SEQ ID NOs: 1753 and 1757 respectively; SEQ ID NOs: 1761 and 1765 respectively; SEQ ID NOs: 1769 and 1773 respectively; SEQ ID NOs: 1777 and 1781 respectively; SEQ ID NOs: 1785 and 1789 respectively; SEQ ID NOs: 1793 and 1797 respectively; SEQ ID NOs: 1817 and 1821 respectively; SEQ ID NOs: 1833 and 1837 respectively; SEQ ID NOs: 1841 and 1845 respectively; SEQ ID NOs: 1849 and 1853 respectively; SEQ ID NOs: 1857 and 1861 respectively; SEQ ID NOs: 1865 and 1869 respectively; SEQ ID NOs: 1889 and 1893 respectively; SEQ ID NOs: 2257 and 2261 respectively; SEQ ID NOs: 2265 and 2269 respectively; SEQ ID NOs: 2281 and 2285 respectively; SEQ ID NOs: 2297 and 2301 respectively; SEQ ID NOs: 2305 and 2309 respectively; SEQ ID NOs: 2313 and 2317 respectively; SEQ ID NOs: 2321 and 2325 respectively; SEQ ID NOs: 2329 and 2333 respectively; SEQ ID NOs: 2337 and 2341 respectively; and SEQ ID NOs: 2345 and 2349 respectively.

[0017] Additionally or alternatively, in some embodiments of the heterodimeric multispecific antibodies disclosed herein, each of VL-3 and VH-3 comprise a V_{L} amino acid sequence and a V_{H} amino acid sequence selected from the group consisting of SEQ ID NOs: 9 and 13 respectively; SEQ ID NOs: 49 and 53 respectively; SEQ ID NOs: 57 and 61 respectively; SEQ ID NOs: 65 and 69 respectively; SEQ ID NOs: 81 and 85 respectively; SEQ ID NOs: 153 and 157 respectively; SEQ ID NOs: 161 and 165 respectively; SEQ ID NOs: 193 and 197 respectively; SEQ ID NOs: 201 and 205 respectively; SEQ ID NOs: 273 and 277 respectively; SEQ ID NOs: 281 and 285 respectively; SEQ ID NOs: 289 and 293 respectively; SEQ ID NOs: 297 and 301 respectively; SEQ ID NOs: 305 and 309 respectively; SEQ ID NOs: 313 and 317 respectively; SEQ ID NOs: 361 and 365 respectively; SEQ ID NOs: 377 and 381 respectively; SEQ ID NOs: 393 and 397 respectively; SEQ ID NOs: 401 and 405 respectively; SEQ ID NOs: 409 and 413 respectively; SEQ ID NOs: 417 and 421 respectively; SEQ ID NOs: 425 and 429 respectively; SEQ ID NOs: 433 and 437 respectively; SEQ ID NOs: 441 and 445 respectively; SEQ ID NOs: 449 and 453 respectively; SEQ ID NOs: 457 and 461 respectively; SEQ ID NOs: 465 and 469 respectively; SEQ ID NOs: 681 and 685 respectively; SEQ ID NOs: 689 and 693 respectively; SEQ ID NOs: 697 and 701 respectively; SEQ ID NOs: 705 and 709 respectively; SEQ ID NOs: 713 and 717 respectively; SEQ ID NOs: 721 and 725 respectively; SEQ ID NOs: 737 and 741 respectively; SEQ ID NOs: 745 and 749 respectively; SEQ ID NOs: 753 and 757 respectively; SEQ ID NOs: 761 and 765 respectively; SEQ ID NOs: 777 and 781 respectively; SEQ ID NOs: 825 and 829 respectively; SEQ ID NOs: 833 and 837 respectively; SEQ ID NOs: 841 and 845 respectively; SEQ ID NOs: 953 and 957 respectively; SEQ ID NOs: 961 and 965 respectively; SEQ ID NOs: 977 and 981 respectively; SEQ ID NOs: 993 and 997 respectively; SEQ ID NOs: 1001 and 1005 respectively; SEQ ID NOs: 1009 and 1013 respectively; SEQ ID NOs: 1017 and 1021 respectively; SEQ ID NOs: 1033 and 1037 respectively; SEQ ID NOs: 1049 and 1053 respectively; SEQ ID NOs: 1073 and 1077 respectively; SEQ ID NOs: 1081 and 1085 respectively; SEQ ID NOs: 1089 and 1093 respectively; SEQ ID NOs: 1105 and 1109 respectively; SEQ ID NOs: 1129 and 1133 respectively; SEQ ID NOs: 1137 and 1141 respectively; SEQ ID NOs: 1153 and 1157 respectively; SEQ ID NOs: 1161 and 1165 respectively; SEQ ID NOs: 1177 and 1181 respectively; SEQ ID NOs: 1225 and 1229 respectively; SEQ ID NOs: 1241 and 1245 respectively; SEQ ID NOs: 1257 and 1261 respectively; SEQ ID NOs: 1265 and 1269 respectively; SEQ ID NOs: 1297 and 1301 respectively; SEQ ID NOs: 1393 and 1397 respectively; SEQ ID NOs: 1409 and 1413 respectively; SEQ ID NOs: 1425 and 1429 respectively; SEQ ID NOs: 1441 and 1445 respectively; SEQ ID NOs: 1449 and 1453 respectively; SEQ ID NOs: 1457 and 1461 respectively; SEQ ID NOs: 1465 and 1469 respectively; SEQ ID NOs: 1473 and 1477 respectively; SEQ ID NOs: 1481 and 1485 respectively; SEQ ID NOs: 1497 and 1501 respectively; SEQ ID NOs: 1505 and 1509 respectively; SEQ ID NOs: 1513 and 1517 respectively; SEQ ID NOs: 1521 and 1525 respectively; SEQ ID NOs: 1529 and 1533 respectively; SEQ ID NOs: 1545 and 1549 respectively; SEQ ID NOs: 1553 and 1557 respectively; SEQ ID NOs: 1561 and 1565 respectively; SEQ ID NOs: 1569 and 1573 respectively; SEQ ID NOs: 1577 and 1581 respectively; SEQ ID NOs: 1585 and 1589 respectively; SEQ ID NOs: 1609 and 1613 respectively; SEQ ID NOs: 1617 and 1621 respectively; SEQ ID NOs: 1649 and 1653 respectively; SEQ ID NOs: 1657 and 1661 respectively; SEQ ID NOs: 1673 and 1677 respectively; SEQ ID NOs: 1689 and 1693 respectively; SEQ ID NOs: 1697 and 1701 respectively; SEQ ID NOs: 1705 and 1709 respectively; SEQ ID NOs: 1713 and 1717 respectively; SEQ ID NOs: 1721 and 1725 respectively; SEQ ID NOs: 1729 and 1733 respectively; SEQ ID NOs: 1745 and 1749 respectively; SEQ ID NOs: 1753 and 1757 respectively; SEQ ID NOs: 1761 and 1765 respectively; SEQ ID NOs: 1769 and 1773 respectively; SEQ ID NOs: 1777 and 1781 respectively; SEQ ID NOs: 1785 and 1789 respectively; SEQ ID NOs: 1793 and 1797 respectively; SEQ ID NOs: 1817 and 1821 respectively; SEQ ID NOs: 1833 and 1837 respectively; SEQ ID NOs: 1841 and 1845 respectively; SEQ ID NOs: 1849 and 1853 respectively; SEQ ID NOs: 1857 and 1861 respectively; SEQ ID NOs: 1865 and 1869 respectively; SEQ ID NOs: 1889 and 1893 respectively; SEQ ID NOs: 2257 and 2261 respectively; SEQ ID NOs: 2265 and 2269 respectively; SEQ ID NOs: 2281 and 2285 respectively; SEQ ID NOs: 2297 and 2301 respectively; SEQ ID NOs: 2305 and 2309 respectively; SEQ ID NOs: 2313 and 2317 respectively; SEQ ID NOs: 2321 and 2325 respectively; SEQ ID NOs: 2329 and 2333 respectively; SEQ ID NOs: 2337 and 2341 respectively; and SEQ ID NOs: 2345 and 2349 respectively.

[0018] Additionally or alternatively, in some embodiments of the heterodimeric multispecific antibodies disclosed herein, each of VL-2 and VH-2 comprise a V_{L} amino acid sequence and a V_{H} amino acid sequence selected from the group consisting of SEQ ID NOs: 17 and 21 respectively; SEQ ID NOs: 25 and 29 respectively; SEQ ID NOs: 33 and 37 respectively; SEQ ID NOs: 41 and 45 respectively; SEQ ID NOs: 121 and 125 respectively; SEQ ID NOs: 137 and 141 respectively; SEQ ID NOs: 169 and 173 respectively; SEQ ID NOs: 177 and 181 respectively; SEQ ID NOs: 185 and 189 respectively; SEQ ID NOs: 193 and 197 respectively; SEQ ID NOs: 201 and 205 respectively; SEQ ID NOs: 209 and 213 respectively; SEQ ID NOs: 217 and 221 respectively; SEQ ID NOs: 225 and 229 respectively; SEQ ID NOs: 233 and 237 respectively; SEQ ID NOs: 241 and 245 respectively; SEQ ID NOs: 249 and 253 respectively; SEQ ID NOs: 257 and 261 respectively; SEQ ID NOs: 265 and 269 respectively; SEQ ID NOs: 321 and 325 respectively; SEQ ID NOs: 329 and 333 respectively; SEQ ID NOs: 337 and 341 respectively; SEQ ID NOs: 393 and 397 respectively; SEQ ID NOs: 401 and 405 respectively; SEQ ID NOs: 409 and 413 respectively; SEQ ID NOs: 473 and 477 respectively; SEQ ID NOs: 481 and 485 respectively; SEQ ID NOs: 489 and 493 respectively; SEQ ID NOs: 497 and 501 respectively; SEQ ID NOs: 505 and 509 respectively; SEQ ID NOs: 513 and 517 respectively; SEQ ID NOs: 545 and 549 respectively; SEQ ID NOs: 553 and 557 respectively; SEQ ID NOs: 561 and 565 respectively; SEQ ID NOs: 569 and 573 respectively; SEQ ID NOs: 577 and 581 respectively; SEQ ID NOs: 585 and 589 respectively; SEQ ID NOs: 593 and 597 respectively; SEQ ID NOs: 601 and 605 respectively; SEQ ID NOs: 625 and 629 respectively; SEQ ID NOs: 633 and 637 respectively; SEQ ID NOs: 641 and 645 respectively; SEQ ID NOs: 649 and 653 respectively; SEQ ID NOs: 657 and 661 respectively; SEQ ID NOs: 665 and 669 respectively; SEQ ID NOs: 673 and 677 respectively; SEQ ID NOs: 681 and 685 respectively; SEQ ID NOs: 689 and 693 respectively; SEQ ID NOs: 697 and 701 respectively; SEQ ID NOs: 705 and 709 respectively; SEQ ID NOs: 713 and 717 respectively; SEQ ID NOs: 721 and 725 respectively; SEQ ID NOs: 729 and 733 respectively; SEQ ID NOs: 737 and 741 respectively; SEQ ID NOs: 745 and 749 respectively; SEQ ID NOs: 753 and 757 respectively; SEQ ID NOs: 761 and 765 respectively; SEQ ID NOs: 769 and 773 respectively; SEQ ID NOs: 785 and 789 respectively; SEQ ID NOs: 793 and 797 respectively; SEQ ID NOs: 801 and 805 respectively; SEQ ID NOs: 809 and 813 respectively; SEQ ID NOs: 817 and 821 respectively; SEQ ID NOs: 849 and 853 respectively; SEQ ID NOs: 857 and 861 respectively; SEQ ID NOs: 865 and 869 respectively; SEQ ID NOs: 873 and 877 respectively; SEQ ID NOs: 881 and 885 respectively; SEQ ID NOs: 889 and 893 respectively; SEQ ID NOs: 897 and 901 respectively; SEQ ID NOs: 905 and 909 respectively; SEQ ID NOs: 913 and 917 respectively; SEQ ID NOs: 921 and 925 respectively; SEQ ID NOs: 929 and 933 respectively; SEQ ID NOs: 937 and 941 respectively; SEQ ID NOs: 945 and 949 respectively; SEQ ID NOs: 969 and 973 respectively; SEQ ID NOs: 977 and 981 respectively; SEQ ID NOs: 1009 and 1013 respectively; SEQ ID NOs: 1057 and 1061 respectively; SEQ ID NOs: 1537 and 1541 respectively; SEQ ID NOs: 1569 and 1573 respectively; SEQ ID NOs: 1601 and 1605 respectively; SEQ ID NOs: 1641 and 1645 respectively; SEQ ID NOs: 1665 and 1669 respectively; SEQ ID NOs: 1825 and 1829 respectively; SEQ ID NOs: 1865 and 1869 respectively; SEQ ID NOs: 1897 and 1901 respectively; SEQ ID NOs: 1905 and 1909 respectively; SEQ ID NOs: 1913 and 1917 respectively; SEQ ID NOs: 1921 and 1925 respectively; SEQ ID NOs: 1929 and 1933 respectively; SEQ ID NOs: 2265 and 2269 respectively; SEQ ID NOs: 2281 and 2285 respectively; 2289 and 2293 respectively; 2329 and 2333 respectively; and SEQ ID NOs: 2345 and 2349, respectively.

[0019] Additionally or alternatively, in some embodiments of the heterodimeric multispecific antibodies disclosed herein, each of VL-4 and VH-4 comprise a V_{L} amino acid sequence and a V_{H} amino acid sequence selected from the group consisting of SEQ ID NOs: 17 and 21 respectively; SEQ ID NOs: 25 and 29 respectively; SEQ ID NOs: 33 and 37 respectively; SEQ ID NOs: 41 and 45 respectively; SEQ ID NOs: 121 and 125 respectively; SEQ ID NOs: 137 and 141 respectively; SEQ ID NOs: 169 and 173 respectively; SEQ ID NOs: 177 and 181 respectively; SEQ ID NOs: 185 and 189 respectively; SEQ ID NOs: 193 and 197 respectively; SEQ ID NOs: 201 and 205 respectively; SEQ ID NOs: 209 and 213 respectively; SEQ ID NOs: 217 and 221 respectively; SEQ ID NOs: 225 and 229 respectively; SEQ ID NOs: 233 and 237 respectively; SEQ ID NOs: 241 and 245 respectively; SEQ ID NOs: 249 and 253 respectively; SEQ ID NOs: 257 and 261 respectively; SEQ ID NOs: 265 and 269 respectively; SEQ ID NOs: 321 and 325 respectively; SEQ ID NOs: 329 and 333 respectively; SEQ ID NOs: 337 and 341 respectively; SEQ ID NOs: 393 and 397 respectively; SEQ ID NOs: 401 and 405 respectively; SEQ ID NOs: 409 and 413 respectively; SEQ ID NOs: 473 and 477 respectively; SEQ ID NOs: 481 and 485 respectively; SEQ ID NOs: 489 and 493 respectively; SEQ ID NOs: 497 and 501 respectively; SEQ ID NOs: 505 and 509 respectively; SEQ ID NOs: 513 and 517 respectively; SEQ ID NOs: 545 and 549 respectively; SEQ ID NOs: 553 and 557 respectively; SEQ ID NOs: 561 and 565 respectively; SEQ ID NOs: 569 and 573 respectively; SEQ ID NOs: 577 and 581 respectively; SEQ ID NOs: 585 and 589 respectively; SEQ ID NOs: 593 and 597 respectively; SEQ ID NOs: 601 and 605 respectively; SEQ ID NOs: 625 and 629 respectively; SEQ ID NOs: 633 and 637 respectively; SEQ ID NOs: 641 and 645 respectively; SEQ ID NOs: 649 and 653 respectively; SEQ ID NOs: 657 and 661 respectively; SEQ ID NOs: 665 and 669 respectively; SEQ ID NOs: 673 and 677 respectively; SEQ ID NOs: 681 and 685 respectively; SEQ ID NOs: 689 and 693 respectively; SEQ ID NOs: 697 and 701 respectively; SEQ ID NOs: 705 and 709 respectively; SEQ ID NOs: 713 and 717 respectively; SEQ ID NOs: 721 and 725 respectively; SEQ ID NOs: 729 and 733 respectively; SEQ ID NOs: 737 and 741 respectively; SEQ ID NOs: 745 and 749 respectively; SEQ ID NOs: 753 and 757 respectively; SEQ ID NOs: 761 and 765 respectively; SEQ ID NOs: 769 and 773 respectively; SEQ ID NOs: 785 and 789 respectively; SEQ ID NOs: 793 and 797 respectively; SEQ ID NOs: 801 and 805 respectively; SEQ ID NOs: 809 and 813 respectively; SEQ ID NOs: 817 and 821 respectively; SEQ ID NOs: 849 and 853 respectively; SEQ ID NOs: 857 and 861 respectively; SEQ ID NOs: 865 and 869 respectively; SEQ ID NOs: 873 and 877 respectively; SEQ ID NOs: 881 and 885 respectively; SEQ ID NOs: 889 and 893 respectively; SEQ ID NOs: 897 and 901 respectively; SEQ ID NOs: 905 and 909 respectively; SEQ ID NOs: 913 and 917 respectively; SEQ ID NOs: 921 and 925 respectively; SEQ ID NOs: 929 and 933 respectively; SEQ ID NOs: 937 and 941 respectively; SEQ ID NOs: 945 and 949 respectively; SEQ ID NOs: 969 and 973 respectively; SEQ ID NOs: 977 and 981 respectively; SEQ ID NOs: 1009 and 1013 respectively; SEQ ID NOs: 1057 and 1061 respectively; SEQ ID NOs: 1537 and 1541 respectively; SEQ ID NOs: 1569 and 1573 respectively; SEQ ID NOs: 1601 and 1605 respectively; SEQ ID NOs: 1641 and 1645 respectively; SEQ ID NOs: 1665 and 1669 respectively; SEQ ID NOs: 1825 and 1829 respectively; SEQ ID NOs: 1865 and 1869 respectively; SEQ ID NOs: 1897 and 1901 respectively; SEQ ID NOs: 1905 and 1909 respectively; SEQ ID NOs: 1913 and 1917 respectively; SEQ ID NOs: 1921 and 1925 respectively; SEQ ID NOs: 1929 and 1933 respectively; SEQ ID NOs: 2265 and 2269 respectively; SEQ ID NOs: 2281 and 2285 respectively; 2289 and 2293 respectively; 2329 and 2333 respectively; and SEQ ID NOs: 2345 and 2349, respectively.

[0020] Additionally or alternatively, in some embodiments of the heterodimeric multispecific antibodies disclosed herein, the first immunoglobulin or the third immunoglobulin binds to a cell surface antigen selected from the group consisting of a2b b3 (Glycoprotein IIb/IIIa), a4, a4b7, a4b7+aEb7, a5, Activin receptor type-2B, ALK1, Alpha-synuclein, amyloid beta, APP, AXL, Blood Group A, CAIX, CCL-2, CD105 (endoglin), CD115 (CSF1R), CD116a (CSF2Ra), CD123, CD152 (CTLA4), CD184 (CXCR4), CD19, CD192 (CCR2), CD194 (CCR4), CD195 (CCR5), CD20, CD200, CD22, CD221 (IGF1R), CD248, CD25, CD257 (BAFF), CD26, CD262 (DR5), CD276 (B7H3), CD3, CD30 (TNFRSF8), CD319 (SLAMF7), CD33, CD332 (FGFR2), CD350 (FZD10), CD37, CD371 (CLEC12A), CD38, CD4, CD49b (a2), CD51 (a5), CD52, CD56, CD61 (a4b3), CD70, CD73 (NTSE), CD74, CEA, Claudin-18.2, cMET, CRLR, DLL3, DLL4, DNA/histone (H1) complex, EGFR, EpCAM, EGFR-HER3, EGFRvIII, EphA3, ERGT(GalNAc) Tn Antigen, FLT1, FOLR1, frizzled family receptor (FZD), Lewis Y, Lewis X, GCGR, GD2, GD2 α-acetyl, GD3, GM1, GM1 fucosyl, GM2, GPA33, GPNMB, GUCY2C, HER2, HER3, HGFR (cMET), IgHe, IGLF2, Kallikreins, LINGO1, LOXL2, Ly6/PLAUR domain-containing protein 3, MADCAM1, MAG, Mesothelin, MT1-MMP (MMP14), MUC1, Mucin SAC, NaPi2b, NeuGc-GM3, notch, NOTCH2/NOTCH3 receptors, oxLDL, P-selectin, PCSK9, PDGFRA, PDGFRa, phosphatidylserine, polysialic acid, PSMA, PVRL4, RGMA, CD240D Blood group D antigen, root plate-specific spondin 3, serum amyloid P component, STEAP-1, TACSTD2, TGFb, TWEAKR, TYRP1, VEGFR2, VSIR, CD171 (L1CAM), CD19, CD47, pMHC[NY-ESO1], pMHC[MART1], pMHC[MAGEA1], pMHC[Tyrosinase], pMHC[gp100], pMHC[MUC1], pMHC[tax], pMHC[WT-1], pMHC[EBNA-1], pMHC[LMP2], pMHC[hTERT], GPC3, CD80, CD23, and fibronectin extra domain-B. The first immunoglobulin and the third immunoglobulin may bind to the same epitope on a target cell or two different epitopes on a target cell. In some embodiments, the target cell is a cancer cell.

[0021] Additionally or alternatively, in some embodiments of the heterodimeric multispecific antibodies disclosed herein, the second immunoglobulin or the fourth immunoglobulin bind to an epitope on a white blood cell, a monocyte, a lymphocyte, a granulocyte, a macrophage, a T cell, a NK cell, a B cell, a NKT cell, an ILC, or neutrophil.

[0022] In any of the above embodiments of the heterodimeric multispecific antibodies disclosed herein, the second immunoglobulin or the fourth immunoglobulin bind to an antigen selected from the group consisting of Dabigatran, a4, a4b7, a4b7+aEb7, a5, AXL, BnDOTA, CD11a (LFA-1), CD3, CD4, CD8, CD16, CD19, CD22, CD23, CD25, CD28, CD30 (TNFRSF8), CD33, CD38, CD40, CD40L, CD47, CD49b (a2), CD54 (ICAM-1), CD56, CD74, CD80, CD115 (CSF1R), CD116a (CSF2Ra), CD123, CD134 (OX40), CD137 (41BB), CD152 (CTLA4), CD184 (CXCR4), CD192 (CCR2), CD194 (CCR4), CD195 (CCR5), CD223 (LAG-3), CD252 (OX40L), CD254 (RANKL), CD262 (DR5), CD27, CD200, CD221 (IGF1R), CD248, CD274 (PD-L1), CD275 (ICOS-L), CD278 (ICOS), CD279 (PD-1), CD319 (SLAMF7), CD371 (CLEC12A), MADCAM1, MT1-MMP (MMP14), NKG2A, NRP1,TIGIT, VSIR, KIRDL1/2/3, and KIR2DL2. The second immunoglobulin and the fourth immunoglobulin may bind to the same epitope or different epitopes on a white blood cell, a monocyte, a lymphocyte, a granulocyte, a macrophage, a T cell, a NK cell, a B cell, a NKT cell, an ILC, or neutrophil. In some embodiments, the second immunoglobulin binds CD3 and the fourth immunoglobulin binds an immune cell receptor selected from the group consisting of CD4, CD8, CD25, CD28, CTLA4, OX40, ICOS, PD-1, PD-L1, 41BB, CD2, CD69, and CD45. In other embodiments, the second immunoglobulin binds CD16 and the fourth immunoglobulin binds an immune cell receptor selected from the group consisting of CD56, NKG2D, and KIRDL1/2/3. In certain embodiments, the fourth immunoglobulin binds to an agent selected from the group consisting of a cytokine, a nucleic acid, a hapten, a small molecule, a radionuclide, an immunotoxin, a vitamin, a peptide, a lipid, a carbohydrate, biotin, digoxin, or any conjugated variants thereof.

[0023] Additionally or alternatively, in some embodiments of the heterodimeric multispecific antibodies disclosed herein, the first immunoglobulin and the third immunoglobulin bind to their respective epitopes with a monovalent affinity or an effective affinity between about 100 nM to about 100 pM. In certain embodiments, the first immunoglobulin and the third immunoglobulin bind to cell surface epitopes that are between 60 and 120 angstroms apart.

[0024] Additionally or alternatively, in some embodiments of the heterodimeric multispecific antibodies disclosed herein, the first immunoglobulin and the third immunoglobulin bind to their respective epitopes with a monovalent affinity or an effective affinity that is less than 100 pM. In certain embodiments, the first immunoglobulin and the third immunoglobulin bind to cell surface epitopes that are up to 180 angstroms apart.

[0025] Additionally or alternatively, in some embodiments of the heterodimeric multispecific antibodies disclosed herein, the first heterodimerization domain of the first immunoglobulin and/or the second heterodimerization domain of the third immunoglobulin is a CH2-CH3 domain and has an isotype selected from the group consisting of IgG1, IgG2, IgG3, IgG4, IgA1, IgA2, IgM, IgD, and IgE.

[0026] Additionally or alternatively, in some embodiments of the heterodimeric multispecific antibodies disclosed herein, the first heterodimerization domain of the first immunoglobulin and/or the second heterodimerization domain of the third immunoglobulin comprises an IgG1 constant region comprising one or more amino acid substitutions selected from the group consisting of N297A and K322A. Additionally or alternatively, in some embodiments of the heterodimeric multispecific antibodies disclosed herein, the first heterodimerization domain of the first immunoglobulin is a CH2-CH3 domain comprising a K409R mutation and the second heterodimerization domain of the third immunoglobulin is a CH2-CH3 domain comprising a F405L mutation.

[0027] Also disclosed herein are recombinant nucleic acid sequences encoding any of the antibodies described herein. In another aspect, the present technology provides a host cell or vector expressing any nucleic acid sequence encoding any of the antibodies described herein.

[0028] In any of the above embodiments of the immunoglobulin-related compositions of the present technology, the HDTVS antibody may be optionally conjugated to an agent selected from the group consisting of isotopes, dyes, chromagens, contrast agents, drugs, toxins, cytokines, enzymes, enzyme inhibitors, hormones, hormone antagonists, growth factors, radionuclides, metals, liposomes, nanoparticles, RNA, DNA or any combination thereof.

[0029] In one aspect, the present disclosure provides a method for treating cancer in a subject in need thereof, comprising administering to the subject an effective amount of a heterodimeric multispecific antibody disclosed herein. The cancer may be lung cancer, colorectal cancer, skin cancer, breast cancer, ovarian cancer, leukemia, pancreatic cancer, or gastric cancer. Additionally or alternatively, in some embodiments, the heterodimeric multispecific antibody is administered to the subject separately, sequentially or simultaneously with an additional therapeutic agent.

[0030] Also disclosed herein are kits for detection and/or treatment of a disease (e.g., cancers), comprising at least one heterodimeric trivalent/tetravalent multispecific antibody of the present technology and instructions for use.

### BRIEF DESCRIPTION OF THE DRAWINGS

[0031] FIG. 1a shows the basic design strategy of each HeteroDimeric TetraValency and Specificity (HDTVS) variant compared with the parental 2+2 IgG-[L]-scFv. The 5 heterodimeric IgG-L-scFv designs display novel biological activities. Each construct uses heterodimerization to achieve tri- or tetraspecificity.

[0032] FIG. 1b shows a schematic of the 1+1+2 Low affinity design and how it can be used to distinguish single-antigen positive healthy cells from dual-antigen positive target cells. Single antigen positivity would result in inferior immune cell activation over dual antigen positivity.

[0033] FIG. 1c shows a schematic of the 1+1+2 High affinity design and how it can be used to target either (or both) of two different cellular antigens.

[0034] FIG. 1d shows a schematic of the 2+1+1 design and how it can be used to improve immune cell activation. Targeting of two different immune cell receptors can be used to more specifically recruit an immune cell population or provide greater immune cell activation or inhibition through cross linking of multiple receptors.

[0035] FIG. 1e shows a schematic of the 2+1+1 design and how it can be used to broaden immune cell recruitment or combine payload delivery with immunotherapy. Each HDTVS antibody needs only one immune cell receptor for recruitment and activation. The additional domain can then be used to bind payloads (for diagnostics, therapy, recruitment, etc.) or additional effector cells.

[0036] FIG. 1f shows a schematic of the 1+1+1+1 design and how it can be used to combine the benefits of 1+1+2 with 2+1+1. In this embodiment, tetraspecificity can bring better specificity or a broader range of targets, as well and improved immune cell activation or payload delivery.

[0037] FIG. 2a shows the superior cytotoxicity, binding and in vivo potency of the IgG-[L]-scFv design over the IgG-Het and BiTE formats. A 4 hr Cr⁵¹′ release assay was used to evaluate cytotoxicity of activated T-cells against M14 melanoma tumor cells. Flow cytometry was used to evaluate differences in antigen binding of each bispecific antibody to huCD3 or GD2 on activated T cells or M14 melanoma tumor cells, respectively. Affinities were measured using SPR on GD2 coated streptavidin chips. Two mouse models were used for assessing in vivo potency, a syngeneic transgenic model which has huCD3 expressing murine T cells, and a humanized xenograft model using activated human T-cells engrafted into immunodeficient IL2-re^{-/-} Rag2^{-/-} BALB/c mice. Mice were implanted subcutaneously with GD2(+) tumors and treated intravenously with a particular test bispecific antibody.

[0038] FIG. 2b shows the superior cytotoxicity of the IgG-[L]-scFv design over the IgG-het using two additional anti-GD2 sequences.

[0039] FIG. 3 shows the schematics of 4 IgG-[L]-scFv heterodimeric variants along with the parental format and the IgG-Het format. Designs are ranked by their relative potency.

[0040] FIG. 4 shows the in vitro binding activity of the various IgG-[L]-scFv variants. GD2 and CD3 affinities were measured using SPR with GD2 or huCD3de coated chips, respectively. Cell binding was assayed by flow cytometry using activated human T cells or M14 melanoma cells. T-cell: tumor cell conjugate formation was measured by flow cytometry using differentially labeled activated human T cells and M14 melanoma tumor cells.

[0041] FIG. 5 shows the in vitro cytotoxicity of each IgG-[L]-scFv variant against two cell lines: M14 melanoma and IMR32 neuroblastoma. Cytotoxicity was measured using a 4 hr Cr⁵¹ release assay and activated human T-cells.

[0042] FIG. 6 shows the in vitro immune cell activation of each IgG-[L]-scFv variant. Activation was measured by flow cytometry. Naïve purified T cells and M14 melanoma cells were co-cultured for 24 or 96 hrs, harvested and stained for CD69 or CD25, respectively. T cells for the 96 hr time points were also labeled with Cell Trace Violet (CTV). Culture supernatant was also collected at the 24 hr time point for cytokine measurements.

[0043] FIG. 7 shows the in vivo activity of each IgG-[L]-scFv variant. Two mouse models were used for assessing in vivo potency, a syngeneic transgenic model which has huCD3 expressing murine T cells, and a humanized xenograft model using activated human T-cells engrafted into immunodeficient IL2-rg^{-/-} Rag2^{-/-} BALB/c mice. Mice were implanted subcutaneously with GD2(+) tumors and treated intravenously with a particular test bispecific antibody.

[0044] FIG. 8 shows various dual bivalent bispecific antibody formats compared to the IgG-[L]-scFv design. Cytotoxicity was evaluated using a 4 hr Cr⁵¹ release assay using activated human T cells and M14 melanoma cells. Conjugation activity was measured using flow cytometry. Cell binding was evaluated by flow cytometry using activated human T cells and M14 melanoma cells.

[0045] FIG. 9 shows IgG-[L]-scFv variants which bind CD33 or HER2. Cell binding activities were measured by flow cytometry using Molm13, SKMEL28, or MCF7 cells. Cytotoxicity was assessed using Molm13 cells and activated human T cells in a 4 hr Cr⁵¹ release assay.

[0046] FIG. 10a shows two 1+1+2 designs (high and low affinity variants). Cell binding and cytotoxicity assays used the GD2(+)HER2(+) cell line U2OS. Cytotoxicity was measured using 4 hr Cr⁵¹ release, and cell binding was evaluated using flow cytometry.

[0047] FIG. 10b shows two 1+1+2 designs (high and low affinity variants). Cell binding and cytotoxicity assays used the GD2(+) IMR32 neuroblastoma cells or HER2(+) HCC1954 breast cancer cells. Cytotoxicity was measured using 4 hr Cr⁵¹ release, and cell binding was evaluated using flow cytometry.

[0048] FIGS. 11a-11e show exemplary Fc variants that are capable of heterodimerization.

[0049] FIG. 12a shows various dual bivalent bispecific antibody formats compared in vivo to the IgG-[L]-scFv design. Schematics show all four dual bivalent bispecific antibodies expressed.

[0050] FIG. 12b shows the mean tumor growth for in vivo huDKO arming model. Tumor responses were evaluated using a T-cell arming model, where T-cells were preincubated with each BsAb for 20 min at a concentration to achieve equal anti-GD2 binding domains (as verified by flow cytometry). These prelabeled or “armed” T-cells were injected intravenously into tumor bearing DKO mice. Each line represents one BsAb. Solid black triangles represent a dose of BsAb armed human activated T-cells (huATC) and IL-2. The dotted black line represents no measurable tumor and the star represents the tumor implantation. Error bars represent standard deviation.

[0051] FIG. 12c shows tumor growth from individual mice. Each figure represents one treatment group, with schematics (see above) for reference. Each solid line represents a single mouse, and the dotted lines represents the group average.

[0052] FIG. 13 demonstrates the combined binding effect of L1CAM/GD2 1+1+2 Lo, a heterodimeric 1+1+2Lo format antibody that can bind ganglioside GD2 and adhesion protein L1CAM simultaneously. Design of the 1+1+2 Lo format antibody is shown on the left side. Homodimeric formats against GD2 and L1CAM were included for reference. For this binding assay, Neuroblastoma cells (IMR32) were incubated with each antibody for 30 minutes at 4° C., washed and incubated with a fluorescent anti-human secondary antibody. After the final wash, the cells were analyzed using flow cytometry. In this example, the binding of the low affinity 1+1+2 HDTVS antibody was stronger than the anti-L1CAM homodimeric antibody, but weaker than the anti-GD2 homodimeric antibody, thus showing improved targeting specificity for tumors expressing both GD2 and L1CAM.

[0053] FIG. 14 demonstrates the combined binding effect of HER2/EGFR 1+1+2 Hi, a heterodimeric 1+1+2Hi format antibody that can bind both HER2 and EGFR, either simultaneously or separately. Design of the 1+1+2 Hi format antibody is shown on the right side. Homodimeric formats against HER2 and EGFR were included for reference. For this binding assay, Desmoplastic Small Cell Round Tumor cells (JN-DSRCT1) were incubated with each antibody for 30 minutes at 4° C., washed and incubated with a fluorescent anti-human secondary antibody. After the final wash, the cells were analyzed using flow cytometry. In this example, the binding of the high affinity 1+1+2 HDTVS antibody was stronger than that of either anti-HER2 or anti-EGFR homodimeric antibodies, while maintaining specificity for both antigens, demonstrating cooperative binding.

[0054] FIG. 15 demonstrates the combined binding effect of GD2/B7H3 1+1+2 Lo, a heterodimeric 1+1+2Lo format antibody that can bind both GD2 and B7H3 simultaneously. Design of the 1+1+2 Lo format antibody is shown on the left hand side. Homodimeric formats against GD2 and B7H3, and monovalent control antibodies against GD2 or B7H3 (GD2 or B7H3 ctrl, respectively) were included for reference. For this binding assay, Osteosarcoma cells (U2OS) were incubated with each antibody for 30 minutes at 4° C., washed and incubated with a fluorescent anti-human secondary antibody. After the final wash, the cells were analyzed using flow cytometry. In this example, the binding of the low affinity 1+1+2 HDTVS antibody was similar to the anti-B7H3 homodimeric antibody, but weaker than the anti-GD2 homodimeric antibody. Importantly, GD2/B7H3 1+1+2 Lo also showed improved binding over monovalent control antibodies, demonstrating cooperative binding.

[0055] FIG. 16 demonstrates the cytotoxic selectivity of HER2/GD2 1+1+2 Lo, a heterodimeric 1+1+2Lo format that can bind both GD2 and HER2 simultaneously. In this format, a low affinity HER2 sequence was used. Design of the 1+1+2 Lo format antibody is shown below the line graph. Homodimeric formats against GD2 and HER2, and monovalent control antibodies against GD2 or HER2 (GD2 and HER2 ctrl, respectively) were included for reference. For this cytotoxicity assay, Osteosarcoma cells (U2OS) were first incubated with ⁵¹Cr for one hour. After the incubation, the ⁵¹Cr labeled target cells were mixed with serial dilutions of the indicated antibody and activated human T-cells for four hours at 37° C. After four hours, supernatant was harvested and analyzed on a gamma counter to quantify the released ⁵¹Cr. Cytotoxicity was measured as the % of released ⁵¹Cr from maximum release. In this example, the low affinity 1+1+2 heterodimer antibody killed the target cells as effectively as the anti-GD2 and anti-HER2 homodimeric antibodies yet showing clear superiority over the monovalent control formats. This demonstrates the selectivity possible with the 1+1+2Lo design: target cells expressing each individual antigen will be targeted with 10-100-fold lower cytotoxic potency than targets expressing both antigens simultaneously. Using a homodimeric design for either GD2 or HER2 would lose such selectivity.

[0056] FIG. 17a demonstrates the cytotoxic dual specificity of HER2/GPA33 1+1+2 Hi, a heterodimeric 1+1+2Hi format that can bind both GPA33 and HER2 simultaneously. Design of the 1+1+2 Hi format antibody is shown below the line graph. Homodimeric formats against GPA33 and HER2, and monovalent control antibodies against GPA33 or HER2 were included for reference. For this cytotoxicity assay, Colon cancer cells (Colo205) were first incubated with ⁵¹Cr for one hour. After the incubation, the ⁵¹Cr labeled target cells were mixed with serial dilutions of the indicated antibody and activated human T-cells for four hours at 37° C. After four hours, the supernatant was harvested and read on a gamma counter to quantify the released ⁵¹Cr. Cytotoxicity was measured as the % of released ⁵¹Cr from maximum release. In this example, the high affinity 1+1+2 heterodimer antibody killed target cells as effectively as the anti-GPA33 homodimeric antibody, but with greater potency than the anti-HER2 homodimeric antibody and monovalent control antibodies. These data demonstrate functional cooperativity between the HER2 and GPA33 antigen-binding domains and illustrate that the dual specificity of a 1+1+2Hi format does not significantly compromise its cytotoxicity against either antigen individually.

[0057] FIG. 17b demonstrates the combined binding effect of HER2/GPA33 1+1+2 Hi, a heterodimeric 1+1+2Hi format that can bind both HER2 and GPA33, either simultaneously or separately. Design of the 1+1+2 Hi format antibody is shown on the right hand side. For this binding assay, Colon cancer cells (Colo205) were incubated with each antibody for 30 minutes at 4° C., washed and incubated with a fluorescent anti-human secondary antibody. After the final wash, the cells were analyzed using flow cytometry. In this example, the affinity binding of the 1+1+2 heterodimer antibody was stronger than either anti-HER2 or anti-GPA33 homodimeric and monovalent control antibodies, while maintaining specificity for both antigens, demonstrating cooperative binding.

[0058] FIG. 18 demonstrates the utility of CD3/CD28 2+1+1, a heterodimeric 2+1+1 design that can bind both CD3 and CD28 on T-cells. Design of the heterodimeric 1+1+2 format antibody is shown below the line graph. Homodimeric formats against CD3 and CD28 were included for reference. For this cytokine assay, naïve human T-cells and Melanoma tumor cells (M14) were co-cultured along with the indicated BsAb for 20 hours before culture supernatants were harvested and analyzed for secreted cytokine IL-2 by flow cytometry. Data was normalized to T-cell cytokine release after 20 hours without target cells or antibody. The CD3/CD28 2+1+1 design showed clearly more potent cytokine release activity than either CD3 or CD28 engagement alone, illustrating cooperative activity from dual CD3/CD28 engagement.

[0059] FIG. 19 demonstrates the combined binding effect of CD3/CD4 2+1+1, a heterodimeric 2+1+1 format antibody that can bind both CD3 and CD4 simultaneously. Design of the heterodimeric 2+1+1 format antibody is shown on the right side. For this binding assay, active human T cells were incubated with each antibody for 30 minutes at 4° C., washed and incubated with a fluorescent anti-human secondary antibody. After the final wash, the cells were analyzed using flow cytometry. In this example, the 2+1+1 heterodimer shows enhanced binding compared to the bivalent CD4 and monomeric CD3 binder (2+1) demonstrating cooperative binding.

[0060] FIG. 20 demonstrates the combined binding effect of CD3/PD-1 2+1+1, a heterodimeric 2+1+1 format antibody that can bind both CD3 and PD-1 simultaneously. Design of the heterodimeric 2+1+1 format antibody is shown on the right side. For this binding assay active human T cells were incubated with each antibody for 30 minutes at 4° C., washed and incubated with a fluorescent anti-human secondary antibody. After the final wash, the cells were analyzed using flow cytometry. In this example, the binding of the 2+1+1 heterodimer was better than either anti-PD-1 homodimeric or anti-CD3 monomeric (2+1) binder, demonstrating cooperative binding.

[0061] FIGS. 21a-21c show the unique characteristics of the IgG-L-scFv design, compared to two other common dual bivalent design strategies: the BiTE-Fc and the IgG-H-scFv. FIG. 21a demonstrates the potent T-cell functional activity of the IgG-L-scFv design compared to other dual bivalent T-cell bispecific antibody formats. Designs of the IgG-L-scFv, BiTE-Fc and the IgG-H-scFv format antibodies are shown below the line graph. For this cytokine assay, naïve T-cells and melanoma tumor cells (M14) were co-cultured along with each BsAb for 20 hours before culture supernatants were harvested and analyzed for secreted cytokine IL-2 by flow cytometry. Data were normalized to T-cell cytokine release after 20 hours without target cells or antibody. In contrast to the IgG-H-scFv (2+2HC) and the BiTE-Fc (2+2B) designs, the IgG-L-scFv format (2+2) demonstrated significant cytokine IL-2 responses in vitro, which correlated with stronger in vivo activity (shown in FIG. 21c). FIG. 21b illustrates the unusually weak T-cell binding activity of the IgG-L-scFv design compared to other dual bivalent T-cell bispecific antibody formats. For this binding assay, T-cells and melanoma tumor cells (M14) were separately incubated with each antibody for 30 minutes at 4° C., washed and incubated with a fluorescent anti-human secondary antibody. After the final wash, the cells were analyzed using flow cytometry. Shown is CD3-specific (FIG. 21b, upper panel), and GD2-specific binding (FIG. 21b, middle panel). Designs of the IgG-L-scFv, BiTE-Fc and the IgG-H-scFv format antibodies are shown in FIG. 21b (lower panel). In contrast to their GD2 binding activity, each BsAb demonstrated quite different T-cell binding activities. These data demonstrated how the IgG-L-scFv design is uniquely different than other dual-bivalent designs, with each scFv showing incomplete bivalent binding. Although the inclusion of two scFv domains in the IgG-L-scFv does show improvement over monovalent designs, it still does not compare to the binding activity of the 2+2HC or 2+2B designs, illustrating the sterically hindered binding of this format. FIG. 21c illustrates the in vivo superiority of the IgG-L-scFv design. In contrast to other dual bivalent designs, the IgG-L-scFv format was the only one capable of controlling tumor growth in mice. Here, immunodeficient mice (Balb/c IL-2Rgc−/−, Rag2−/−) were implanted with neuroblastoma cells (IMR32) subcutaneously, before being treated with intravenous activated T-cells and antibody (2-times per week). Tumors sizes were measured by caliper.

[0062] FIG. 22 demonstrates the in vitro properties and design of anti-CD33/CD3 IgG-[L]-scFv panel. The in vitro cytotoxicity EC₅₀, fold-difference in EC₅₀, antigen valency, heterodimer design and protein purity by SEC-HPLC for anti-CD33/CD3 IgG-[L]-scFv panel are summarized. Fold change is based on the EC₅₀ of 2+2. Purity was calculated as the fraction of protein at correct elution time out of the total protein by area under the curve of the SEC-HPLC chromatogram. For the cytotoxicity assays, CD33-transfected cells (Nalm6) were first incubated with ⁵¹Cr for one hour. Afterwards, ⁵¹Cr labeled target cells were mixed with serial titrations of the indicated antibody and activated human T-cells for four hours at 37° C. The supernatant was harvested and analyzed on a gamma counter to quantify the released ⁵¹Cr. Cytotoxicity was measured as the % of released ⁵¹Cr from maximum release. These results confirm the relative importance of Cis-oriented binding domains in an additional antigen system (CD33) which is much more membrane distal than GD2 (see FIG. 5).

[0063] FIG. 23 provides a summary of the various HDTVS antibodies tested in the Examples disclosed herein. The table summarizes all successfully produced HDTVS formatted multi-specific antibodies across a variety of antigen models. All clones were expressed in Expi293 cells and heterodimerized using the controlled Fab Arm Exchange method. HDTVS type displays the category of each clone. Fab 1 and scFv 1 (and corresponding Ag1 and Ag3) are attached in a cis-orientation on one heavy chain (linked by the light chain of Fab) while Fab 2 and scFv 2 (and corresponding Ag2 and Ag4) are on a separate heavy chain molecule in a cis-orientation (linked by the light chain of Fab).

### DETAILED DESCRIPTION

[0064] It is to be appreciated that certain aspects, modes, embodiments, variations and features of the present methods are described below in various levels of detail in order to provide a substantial understanding of the present technology.

[0065] In practicing the present methods, many conventional techniques in molecular biology, protein biochemistry, cell biology, immunology, microbiology and recombinant DNA are used. See, e.g., Sambrook and Russell eds. (2001) Molecular Cloning: A Laboratory Manual, 3rd edition; the series Ausubel et al. eds. (2007) Current Protocols in Molecular Biology; the series Methods in Enzymology (Academic Press, Inc., N.Y.); MacPherson et al. (1991) PCR 1: A Practical Approach (IRL Press at Oxford University Press); MacPherson et al. (1995) PCR 2: A Practical Approach; Harlow and Lane eds. (1999) Antibodies, A Laboratory Manual; Freshney (2005) Culture of Animal Cells: A Manual of Basic Technique, 5th edition; Gait ed. (1984) Oligonucleotide Synthesis; U.S. Pat. No. 4,683,195; Hames and Higgins eds. (1984) Nucleic Acid Hybridization; Anderson (1999) Nucleic Acid Hybridization; Hames and Higgins eds. (1984) Transcription and Translation; Immobilized Cells and Enzymes (IRL Press (1986)); Perbal (1984) A Practical Guide to Molecular Cloning; Miller and Calos eds. (1987) Gene Transfer Vectors for Mammalian Cells (Cold Spring Harbor Laboratory); Makrides ed. (2003) Gene Transfer and Expression in Mammalian Cells; Mayer and Walker eds. (1987) Immunochemical Methods in Cell and Molecular Biology (Academic Press, London); and Herzenberg et al. eds (1996) Weir's Handbook of Experimental Immunology. Methods to detect and measure levels of polypeptide gene expression products (i.e., gene translation level) are well-known in the art and include the use of polypeptide detection methods such as antibody detection and quantification techniques. (See also, Strachan & Read, Human Molecular Genetics, Second Edition. (John Wiley and Sons, Inc., NY, 1999)).

[0066] Advances in protein engineering can enhance the functional output of proteins by linking different peptides in sequences, or by arranging them in complexes that do not exist naturally. Antibodies have served as a platform for such enhancements, where antigen binding can be modulated through antigen affinity maturation (Boder et al., Proc Natl Acad Sci USA 97:10701-10705 (2000)) or increases in valency (Cuesta et al., Trends Biotechnol 28:355-362 (2010)). Fc receptor binding can be modulated through point mutations (Leabman et al., MAbs 5:896-903 (2013)) or changes in glycosylation (Xu et al., Cancer Immun Res 4: 631-638 (2016)) whereas pharmacokinetics can be influenced through ablation of FcR(n) binding (Suzuki et al., J Immunol 184:1968-1976 (2010)) or removal of entire antibody domains. However, no single antibody platform to date has shown a clear and significant functional advantage over others within the clinic.

[0067] The present disclosure provides an antibody platform in which up to 4 different antigen binding domains can be used to simultaneously engage up to 4 different cellular targets, thereby increasing avidity and modulating specificity of the therapeutic antibodies. This platform is based on the heterodimerization of two IgG half molecules, in which each IgG half molecule comprises a heavy chain and a light chain, wherein a scFv is linked to the C-terminus of at least one light chain (i.e., IgG-[L]-scFv platform). The resulting heterodimers are both trivalent/tetravalent and multispecific and are collectively referred to as HDTVS antibodies.

[0068] The native form of the IgG-[L]-scFv platform has bivalent binding to two different targets (2+2) (each integer represents a different specificity, while its value represents the valency). The present disclosure provides 5 HDTVS platform variants which vary the 4 functional domains (2 Fabs and 2 scFv) in the IgG(L)-scFv format: (1) the Lo1+1+2 HDTVS variant to achieve improved tumor cell specificity, (2) the Hi1+1+2 HDTVS variant to achieve broader tumor cell selectivity, (3) the 2+1+1 HDTVS variant to achieve improved immune cell activation, (4) the 2+1+1 HDTVS variant which allows recruitment of different cells and/or payloads and (5) the 1+1+1+1 HDTVS variant which combines designs from (1) or (2) with (3) or (4) to achieve more effective immune activation or payload delivery with finer specificity or broader selectivity. (FIGS. 1a-1f). In order to test the functional output of these HDTVS variants, one of the 2 Fab domains can be neutralized by using an irrelevant Fab that has no binding to either tumor cells or effector immune cells (e.g., T cells), creating monovalency for tumor. Alternatively, one of the scFv domains can be removed to create monovalency towards effector immune cells (e.g., T cells).

[0069] As described herein, the biological potency of each design is dependent on the biophysical characteristics of the antigen binding domains of the HDTVS variants. Unexpectedly, the changes in valency did not entirely correlate with changes in functional output. As shown in Examples described herein, the biological activity of the tri- and tetra-specific variants of the HDTVS platform is dependent on the antigen/epitope combinations, as well as the relative binding affinities to each target antigen (up to 4 targets total). The Lo1+1+2 HDTVS variant requires its Fab domains to bind to two distinct tumor antigens that are within a proximity of 60-120 angstroms from each other (thus allowing simultaneous binding), and (b) have monovalent and/or effective binding affinities (K_{D}) that range from about 100 nM to about 100 pM to reduce bystander reactivity with healthy cells. The Hi1+1+2 HDTVS variant on the other hand exploits the high monovalent and/or effective binding affinity (K_{D}<100 pM) of its Fab domains such that monovalency is nearly as effective as bivalency. Moreover, the 2+1+1 HDTVS variant exhibited in vivo tumor clearance activity that was comparable to that observed with the 2+2 native form of the IgG-[L]-scFv platform. These results were unexpected given that the binding activities of the 2+1+1 HDTVS variant were about 6-fold lower than the 2+2 native form of the IgG-[L]-scFv platform.

[0070] Accordingly, biophysical properties such as orientation (cis vs trans), valency (mono- vs bi-valent) and target affinity (K_{D}˜nM or <pM) had an unpredictable impact on the functionality of the HDTVS variants (e.g., log-fold enhancement of therapeutic efficacy). Moreover, the HDTVS antibodies of the present technology show superior therapeutic potency compared to other conventional antibody platforms, such as BiTE or heterodimeric IgG (IgG-Het). These results also demonstrate that different multispecific antibody platforms yield antibodies that possess substantially different biological properties. Without wishing to be bound by theory, it is believed that spatial distances between the antigen binding domains of multispecific antibodies, as well as the relative flexibility and orientation of the individual antigen binding domains may determine their ability to drive cell-to-cell interactions.

### Definitions

[0071] Unless defined otherwise, all technical and scientific terms used herein generally have the same meaning as commonly understood by one of ordinary skill in the art to which this technology belongs. As used in this specification and the appended claims, the singular forms “a”, “an” and “the” include plural referents unless the content clearly dictates otherwise. For example, reference to “a cell” includes a combination of two or more cells, and the like. Generally, the nomenclature used herein and the laboratory procedures in cell culture, molecular genetics, organic chemistry, analytical chemistry and nucleic acid chemistry and hybridization described below are those well-known and commonly employed in the art.

[0072] As used herein, a “2+1+1” design refers to a HDTVS antibody in which the two Fab domains recognize and bind to the same target antigen, and the two scFvs recognize and bind to two distinct target antigens. In some embodiments, the two scFvs of the 2+1+1 HDTVS antibody binds to two distinct target antigens that are up to 180 angstroms apart from each other in order to engage two separate molecules on the same cell.

[0073] As used herein, the term “about” in reference to a number is generally taken to include numbers that fall within a range of 1%, 5%, or 10% in either direction (greater than or less than) of the number unless otherwise stated or otherwise evident from the context (except where such number would be less than 0% or exceed 100% of a possible value).

[0074] As used herein, the “administration” of an agent or drug to a subject includes any route of introducing or delivering to a subject a compound to perform its intended function. Administration can be carried out by any suitable route, including but not limited to, orally, intranasally, parenterally (intravenously, intramuscularly, intraperitoneally, or subcutaneously), rectally, intrathecally, intratumorally or topically. Administration includes self-administration and the administration by another.

[0075] As used herein, the term “antibody” collectively refers to immunoglobulins or immunoglobulin-like molecules including by way of example and without limitation, IgA, IgD, IgE, IgG and IgM, combinations thereof, and similar molecules produced during an immune response in any vertebrate, for example, in mammals such as humans, goats, rabbits and mice, as well as non-mammalian species, such as shark immunoglobulins. As used herein, “antibodies” (includes intact immunoglobulins) and “antigen binding fragments” specifically bind to a molecule of interest (or a group of highly similar molecules of interest) to the substantial exclusion of binding to other molecules (for example, antibodies and antibody fragments that have a binding constant for the molecule of interest that is at least 10³ greater, at least 10⁴M⁻¹ greater or at least 10⁵ greater than a binding constant for other molecules in a biological sample). The term “antibody” also includes genetically engineered forms such as chimeric antibodies (for example, humanized murine antibodies), heteroconjugate antibodies (such as, bispecific antibodies). See also, Pierce Catalog and Handbook, 1994-1995 (Pierce Chemical Co., Rockford, Ill.); Kuby, J., Immunology, 3^{rd} Ed., W.H. Freeman & Co., New York, 1997.

[0076] More particularly, antibody refers to a polypeptide ligand comprising at least a light chain immunoglobulin variable region or heavy chain immunoglobulin variable region which specifically recognizes and binds an epitope of an antigen. Antibodies are composed of a heavy and a light chain, each of which has a variable region, termed the variable heavy (V_{H}) region and the variable light (V_{L}) region. Together, the VH region and the VL region are responsible for binding the antigen recognized by the antibody. Typically, an immunoglobulin has heavy (H) chains and light (L) chains interconnected by disulfide bonds. There are two types of light chain, lambda (λ) and kappa (κ). There are five main heavy chain classes (or isotypes) which determine the functional activity of an antibody molecule: IgM, IgD, IgG, IgA and IgE. Each heavy and light chain contains a constant region and a variable region, (the regions are also known as “domains”). In combination, the heavy and the light chain variable regions specifically bind the antigen. Light and heavy chain variable regions contain a “framework” region interrupted by three hypervariable regions, also called “complementarity-determining regions” or “CDRs”. The extent of the framework region and CDRs have been defined (see, Kabat et al., Sequences of Proteins of Immunological Interest, U.S. Department of Health and Human Services, 1991, which is hereby incorporated by reference). The Kabat database is now maintained online. The sequences of the framework regions of different light or heavy chains are relatively conserved within a species. The framework region of an antibody, that is the combined framework regions of the constituent light and heavy chains, largely adopt a β-sheet conformation and the CDRs form loops which connect, and in some cases form part of, the β-sheet structure. Thus, framework regions act to form a scaffold that provides for positioning the CDRs in correct orientation by inter-chain, non-covalent interactions.

[0077] The CDRs are primarily responsible for binding to an epitope of an antigen. The CDRs of each chain are typically referred to as CDR1, CDR2, and CDR3, numbered sequentially starting from the N-terminus, and are also typically identified by the chain in which the particular CDR is located. Thus, a V_{H} CDR3 is located in the variable domain of the heavy chain of the antibody in which it is found, whereas a V_{L} CDR1 is the CDR1 from the variable domain of the light chain of the antibody in which it is found. An antibody that binds a target antigen will have a specific V_{H} region and the V_{L} region sequence, and thus specific CDR sequences. Antibodies with different specificities (i.e. different combining sites for different antigens) have different CDRs. Although it is the CDRs that vary from antibody to antibody, only a limited number of amino acid positions within the CDRs are directly involved in antigen binding. These positions within the CDRs are called specificity determining residues (SDRs). “Immunoglobulin-related compositions” as used herein, refers to antibodies (including monoclonal antibodies, polyclonal antibodies, humanized antibodies, chimeric antibodies, recombinant antibodies, multispecific antibodies, bispecific antibodies, etc.,) as well as antibody fragments. An antibody or antigen binding fragment thereof specifically binds to an antigen.

[0078] As used herein, the term “antibody-related polypeptide” means antigen binding antibody fragments, including single-chain antibodies, that can comprise the variable region(s) alone, or in combination, with all or part of the following polypeptide elements: hinge region, CH₁, CH₂, and CH₃ domains of an antibody molecule. Also included in the technology are any combinations of variable region(s) and hinge region, CH₁, CH₂, and CH₃ domains. Antibody-related molecules useful in the present methods, e.g., but are not limited to, Fab, Fab′ and F(ab′)₂, Fd, single-chain Fvs (scFv), single-chain antibodies, disulfide-linked Fvs (sdFv) and fragments comprising either a V_{L} or V_{H} domain. Examples include: (i) a Fab fragment, a monovalent fragment consisting of the V_{L}, V_{H}, C_{L} and CH₁ domains; (ii) a F(ab′)₂ fragment, a bivalent fragment comprising two Fab fragments linked by a disulfide bridge at the hinge region; (iii) a Fd fragment consisting of the V_{H} and CH₁ domains; (iv) a Fv fragment consisting of the V_{L} and V_{H} domains of a single arm of an antibody, (v) a dAb fragment (Ward et al., Nature 341: 544-546, 1989), which consists of a V_{H} domain; and (vi) an isolated complementarity determining region (CDR). As such “antibody fragments” or “antigen binding fragments” can comprise a portion of a full-length antibody, generally the antigen binding or variable region thereof. Examples of antibody fragments or antigen binding fragments include Fab, Fab′, F(ab′)₂, and Fv fragments; diabodies; linear antibodies; single-chain antibody molecules; and multispecific antibodies formed from antibody fragments.

[0079] “Bispecific antibody” or “BsAb”, as used herein, refers to an antibody that can bind simultaneously to two targets that have a distinct structure, e.g., two different target antigens, two different epitopes on the same target antigen, or a hapten and a target antigen or epitope on a target antigen. A variety of different bispecific antibody structures are known in the art. In some embodiments, each antigen binding moiety in a bispecific antibody includes V_{H} and/or V_{L} regions; in some such embodiments, the V_{H} and/or V_{L} regions are those found in a particular monoclonal antibody. In some embodiments, the bispecific antibody contains two antigen binding moieties, each including VH and/or VL regions from different monoclonal antibodies. In some embodiments, the bispecific antibody contains two antigen binding moieties, wherein one of the two antigen binding moieties includes an immunoglobulin molecule having VH and/or VL regions that contain CDRs from a first monoclonal antibody, and the other antigen binding moiety includes an antibody fragment (e.g., Fab, F(ab′), F(ab′)₂, Fd, Fv, dAB, scFv, etc.) having VH and/or VL regions that contain CDRs from a second monoclonal antibody.

[0080] As used herein, the term “diabodies” refers to small antibody fragments with two antigen binding sites, which fragments comprise a heavy-chain variable domain (VH) connected to a light-chain variable domain (VL) in the same polypeptide chain (VH VL). By using a linker that is too short to allow pairing between the two domains on the same chain, the domains are forced to pair with the complementary domains of another chain and create two antigen binding sites. Diabodies are described more fully in, e.g., EP 404,097; WO 93/11161; and 30 Hollinger et al., Proc. Natl. Acad. Sci. USA, 90: 6444-6448 (1993).

[0081] As used herein, the terms “single-chain antibodies” or “single-chain Fv (scFv)” refer to an antibody fusion molecule of the two domains of the Fv fragment, VL and VH. Single-chain antibody molecules may comprise a polymer with a number of individual molecules, for example, dimer, trimer or other polymers. Furthermore, although the two domains of the Fᵥ fragment, V_{L} and V_{H}, are coded for by separate genes, they can be joined, using recombinant methods, by a synthetic linker that enables them to be made as a single protein chain in which the V_{L} and V_{H} regions pair to form monovalent molecules (known as single-chain Fᵥ (scFv)). Bird et al. (1988) Science 242:423-426 and Huston et al. (1988) Proc. Natl. Acad Sci. USA 85:5879-5883. Such single-chain antibodies can be prepared by recombinant techniques or enzymatic or chemical cleavage of intact antibodies.

[0082] Any of the above-noted antibody fragments are obtained using conventional techniques known to those of skill in the art, and the fragments are screened for binding specificity and neutralization activity in the same manner as are intact antibodies.

[0083] As used herein, an “antigen” refers to a molecule to which an antibody (or antigen binding fragment thereof) can selectively bind. The target antigen may be a protein, carbohydrate, nucleic acid, lipid, hapten, or other naturally occurring or synthetic compound. In some embodiments, the target antigen may be a polypeptide. An antigen may also be administered to an animal to generate an immune response in the animal.

[0084] The term “antigen binding fragment” refers to a fragment of the whole immunoglobulin structure which possesses a part of a polypeptide responsible for binding to antigen. Examples of the antigen binding fragment useful in the present technology include scFv, (scFv)₂, scFvFc, Fab, Fab′ and F(ab′)₂, but are not limited thereto.

[0085] By “binding affinity” is meant the strength of the total noncovalent interactions between a single binding site of a molecule (e.g., an antibody) and its binding partner (e.g., an antigen). The affinity of a molecule X for its partner Y can generally be represented by the dissociation constant (Ku). Affinity can be measured by standard methods known in the art, including those described herein. A low-affinity complex contains an antibody that generally tends to dissociate readily from the antigen, whereas a high-affinity complex contains an antibody that generally tends to remain bound to the antigen for a longer duration.

[0086] As used herein, the term “biological sample” means sample material derived from living cells. Biological samples may include tissues, cells, protein or membrane extracts of cells, and biological fluids (e.g., ascites fluid or cerebrospinal fluid (CSF)) isolated from a subject, as well as tissues, cells and fluids present within a subject. Biological samples of the present technology include, but are not limited to, samples taken from breast tissue, renal tissue, the uterine cervix, the endometrium, the head or neck, the gallbladder, parotid tissue, the prostate, the brain, the pituitary gland, kidney tissue, muscle, the esophagus, the stomach, the small intestine, the colon, the liver, the spleen, the pancreas, thyroid tissue, heart tissue, lung tissue, the bladder, adipose tissue, lymph node tissue, the uterus, ovarian tissue, adrenal tissue, testis tissue, the tonsils, thymus, blood, hair, buccal, skin, serum, plasma, CSF, semen, prostate fluid, seminal fluid, urine, feces, sweat, saliva, sputum, mucus, bone marrow, lymph, and tears. Biological samples can also be obtained from biopsies of internal organs or from cancers. Biological samples can be obtained from subjects for diagnosis or research or can be obtained from non-diseased individuals, as controls or for basic research. Samples may be obtained by standard methods including, e.g., venous puncture and surgical biopsy. In certain embodiments, the biological sample is a breast, lung, colon, or prostate tissue sample obtained by needle biopsy.

[0087] As used herein, the term “cancer” refers to a neoplasm or tumor resulting from abnormal uncontrolled growth of cells. In some embodiments, cancer refers to a benign tumor or a malignant tumor. In some embodiments, the cancer is associated with a specific cancer antigen.

[0088] As used herein, the term “CDR-grafted antibody” means an antibody in which at least one CDR of an “acceptor” antibody is replaced by a CDR “graft” from a “donor” antibody possessing a desirable antigen specificity.

[0089] As used herein, the term “chimeric antibody” means an antibody in which the Fc constant region of a monoclonal antibody from one species (e.g., a mouse Fc constant region) is replaced, using recombinant DNA techniques, with an Fc constant region from an antibody of another species (e.g., a human Fc constant region). See generally, Robinson et al., PCT/US86/02269; Akira et al., European Patent Application 184,187; Taniguchi, European Patent Application 171,496; Morrison et al., European Patent Application 173,494; Neuberger et al., WO 86/01533; Cabilly et al. U.S. Pat. No. 4,816,567; Cabilly et al., European Patent Application 0125,023; Better et al., Science 240: 1041-1043, 1988; Liu et al., Proc. Natl. Acad. Sci. USA 84: 3439-3443, 1987; Liu et al., J. Immunol 139: 3521-3526, 1987; Sun et al., Proc. Natl. Acad. Sci. USA 84: 214-218, 1987; Nishimura et al., Cancer Res 47: 999-1005, 1987; Wood et al., Nature 314: 446-449, 1885; and Shaw et al., J. Natl. Cancer Inst. 80: 1553-1559, 1988.

[0090] As used herein, the term “consensus FR” means a framework (FR) antibody region in a consensus immunoglobulin sequence. The FR regions of an antibody do not contact the antigen.

[0091] As used herein, a “control” is an alternative sample used in an experiment for comparison purpose. A control can be “positive” or “negative.” For example, where the purpose of the experiment is to determine a correlation of the efficacy of a therapeutic agent for the treatment for a particular type of disease, a positive control (a compound or composition known to exhibit the desired therapeutic effect) and a negative control (a subject or a sample that does not receive the therapy or receives a placebo) are typically employed.

[0092] As used herein, the term “effective affinity” refers to the binding constant derived from measuring the overall binding kinetics of a compound with two or more simultaneous binding interactions (e.g., with an IgG, IgM, IgA, IgD, or IgE molecule instead of a Fab domain).

[0093] As used herein, the term “effective amount” refers to a quantity sufficient to achieve a desired therapeutic and/or prophylactic effect, e.g., an amount which results in the prevention of, or a decrease in a disease or condition described herein or one or more signs or symptoms associated with a disease or condition described herein. In the context of therapeutic or prophylactic applications, the amount of a composition administered to the subject will vary depending on the composition, the degree, type, and severity of the disease and on the characteristics of the individual, such as general health, age, sex, body weight and tolerance to drugs. The skilled artisan will be able to determine appropriate dosages depending on these and other factors. The compositions can also be administered in combination with one or more additional therapeutic compounds. In the methods described herein, the therapeutic compositions may be administered to a subject having one or more signs or symptoms of a disease or condition described herein. As used herein, a “therapeutically effective amount” of a composition refers to composition levels in which the physiological effects of a disease or condition are ameliorated or eliminated. A therapeutically effective amount can be given in one or more administrations.

[0094] As used herein, the term “effector cell” means an immune cell which is involved in the effector phase of an immune response, as opposed to the cognitive and activation phases of an immune response. Exemplary immune cells include a cell of a myeloid or lymphoid origin, e.g., lymphocytes (e.g., B cells and T cells including cytolytic T cells (CTLs)), killer cells, natural killer cells, macrophages, monocytes, eosinophils, neutrophils, polymorphonuclear cells, granulocytes, mast cells, and basophils. Effector cells express specific Fc receptors and carry out specific immune functions. An effector cell can induce antibody-dependent cell-mediated cytotoxicity (ADCC), e.g., a neutrophil capable of inducing ADCC. For example, monocytes, macrophages, neutrophils, eosinophils, and lymphocytes which express FcaR are involved in specific killing of target cells and presenting antigens to other components of the immune system, or binding to cells that present antigens.

[0095] “Effector function” as used herein refers to a biochemical event that results from the interaction of an antibody Fc region with an Fc receptor or an antigen. Effector functions include but are not limited to antibody dependent cell mediated cytotoxicity (ADCC), antibody dependent cell mediated phagocytosis (ADCP), and complement dependent cytotoxicity (CDC). Effector functions include both those that operate after the binding of an antigen and those that operate independent of antigen binding.

[0096] As used herein, the term “epitope” means an antigenic determinant (site on an antigen) capable of specific binding to an antibody. Epitopes usually comprise chemically active surface groupings of molecules such as amino acids or sugar side chains and may have specific three-dimensional structural characteristics, as well as specific charge characteristics. Conformational and non-conformational epitopes are distinguished in that the binding to the former but not the latter is lost in the presence of denaturing solvents. Thus, in some embodiments, the heterodimeric trivalent/tetravalent multispecific antibodies disclosed herein may bind a non-conformational epitope and/or a conformational epitope. To screen for antibodies which bind to an epitope, a routine cross-blocking assay such as that described in Antibodies, A Laboratory Manual, Cold Spring Harbor Laboratory, Ed Harlow and David Lane (1988), can be performed. This assay can be used to determine if an antibody binds the same site or epitope as a heterodimeric trivalent/tetravalent multispecific antibody of the present technology. Alternatively, or additionally, epitope mapping can be performed by methods known in the art. For example, the antibody sequence can be mutagenized such as by alanine scanning, to identify contact residues. In a different method, peptides corresponding to different regions of a target protein antigen can be used in competition assays with the test antibodies or with a test antibody and an antibody with a characterized or known epitope.

[0097] As used herein, “expression” includes one or more of the following: transcription of the gene into precursor mRNA; splicing and other processing of the precursor mRNA to produce mature mRNA; mRNA stability; translation of the mature mRNA into protein (including codon usage and tRNA availability); and glycosylation and/or other modifications of the translation product, if required for proper expression and function.

[0098] As used herein, the term “gene” means a segment of DNA that contains all the information for the regulated biosynthesis of an RNA product, including promoters, exons, introns, and other untranslated regions that control expression.

[0099] As used herein, a “heterodimerization domain that is incapable of forming a stable homodimer” refers to a member of a pair of distinct but complementary chemical motifs (e.g., amino acids, nucleotides, sugars, lipids, synthetic chemical structures, or any combination thereof) which either exclusively self-assembles as a heterodimer with the second complementary member of the pair, or shows at least a 10⁴ fold preference for assembling into a heterodimer with the second complementary member of the pair, or forms a homodimer with an identical member that is not stable under reducing conditions such as >2 mM 2-MEA at room temperature for 90 minutes (see e.g., Labrijn, A. F. et al., Proc. Natl. Acad. Sci. 110, 5145-50 (2013). Examples of such heterodimerization domains include, but are not limited to CH2-CH3 that include any of the Fc variants/mutations described herein, WinZip-A1B1, a pair of complementary oligonucleotides, and a CH-1 and CL pair.

[0100] As used herein, “Hi1+1+2” refers to a heterodimeric tetravalent multispecific antibody in which the Fab domains (a) bind to two distinct target epitopes and (b) have monovalent binding affinities or effective affinities (K_{D}) that are <100 pM.

[0101] As used herein, the term “humanized” forms of non-human (e.g., murine) antibodies are chimeric antibodies which contain minimal sequence derived from non-human immunoglobulin. For the most part, humanized antibodies are human immunoglobulins in which hypervariable region residues of the recipient are replaced by hypervariable region residues from a non-human species (donor antibody) such as mouse, rat, rabbit or nonhuman primate having the desired specificity, affinity, and capacity. In some embodiments, Fv framework region (FR) residues of the human immunoglobulin are replaced by corresponding non-human residues. Furthermore, humanized antibodies may comprise residues which are not found in the recipient antibody or in the donor antibody. These modifications are made to further refine antibody performance such as binding affinity. Generally, the humanized antibody will comprise substantially all of at least one, and typically two, variable domains (e.g., Fab, Fab′, F(ab′)₂, or Fv), in which all or substantially all of the hypervariable loops correspond to those of a non-human immunoglobulin and all or substantially all of the FR regions are those of a human immunoglobulin consensus FR sequence although the FR regions may include one or more amino acid substitutions that improve binding affinity. The number of these amino acid substitutions in the FR is typically no more than 6 in the H chain, and in the L chain, no more than 3. The humanized antibody optionally may also comprise at least a portion of an immunoglobulin constant region (Fc), typically that of a human immunoglobulin. For further details, see Jones et al., Nature 321:522-525 (1986); Reichmann et al., Nature 332:323-329 (1988); and Presta, Curr. Op. Struct. Biol. 2:593-596 (1992). See e.g., Ahmed & Cheung, FEBS Letters 588(2):288-297 (2014).

[0102] As used herein, the term “hypervariable region” refers to the amino acid residues of an antibody which are responsible for antigen binding. The hypervariable region generally comprises amino acid residues from a “complementarity determining region” or “CDR” (e.g., around about residues 24-34 (L1), 50-56 (L2) and 89-97 (L3) in the V_{L}, and around about 31-35B (H1), 50-65 (H2) and 95-102 (H3) in the V_{H} (Kabat et al., Sequences of Proteins of Immunological Interest, 5th Ed. Public Health Service, National Institutes of Health, Bethesda, Md. (1991)) and/or those residues from a “hypervariable loop” (e.g., residues 26-32 (L1), 50-52 (L2) and 91-96 (L3) in the V_{L}, and 26-32 (H1), 52A-55 (H2) and 96-101 (H3) in the V_{H} (Chothia and Lesk J. Mol. Biol. 196:901-917 (1987)).

[0103] As used herein, the term “intact antibody” or “intact immunoglobulin” means an antibody that has at least two heavy (H) chain polypeptides and two light (L) chain polypeptides interconnected by disulfide bonds. Each heavy chain is comprised of a heavy chain variable region (abbreviated herein as HCVR or V_{H}) and a heavy chain constant region. The heavy chain constant region is comprised of three domains, CH₁, CH₂ and CH₃. Each light chain is comprised of a light chain variable region (abbreviated herein as LCVR or V_{L}) and a light chain constant region. The light chain constant region is comprised of one domain, CL. The V_{H} and V_{L} regions can be further subdivided into regions of hypervariability, termed complementarity determining regions (CDR), interspersed with regions that are more conserved, termed framework regions (FR). Each V_{H} and V_{L} is composed of three CDRs and four FRs, arranged from amino-terminus to carboxyl-terminus in the following order: FR₁, CDR₁, FR₂, CDR₂, FR₃, CDR₃, FR₄. The variable regions of the heavy and light chains contain a binding domain that interacts with an antigen. The constant regions of the antibodies can mediate the binding of the immunoglobulin to host tissues or factors, including various cells of the immune system (e.g., effector cells) and the first component (Clq) of the classical complement system.

[0104] As used herein, the terms “individual”, “patient”, or “subject” can be an individual organism, a vertebrate, a mammal, or a human. In some embodiments, the individual, patient or subject is a human.

[0105] As used herein, “Lo1+1+2” refers to a heterodimeric tetravalent multispecific antibody in which the Fab domains (a) bind to two distinct target epitopes that are within a proximity of 60-120 angstroms from each other (thus allowing simultaneous binding), and (b) have monovalent binding affinities or effective affinities (K_{D}) that range from about 100 nM to about 100 pM.

[0106] The term “monoclonal antibody” as used herein refers to an antibody obtained from a population of substantially homogeneous antibodies, i.e., the individual antibodies comprising the population are identical except for possible naturally occurring mutations that may be present in minor amounts. For example, a monoclonal antibody can be an antibody that is derived from a single clone, including any eukaryotic, prokaryotic, or phage clone, and not the method by which it is produced. A monoclonal antibody composition displays a single binding specificity and affinity for a particular epitope. Monoclonal antibodies are highly specific, being directed against a single antigenic site. Furthermore, in contrast to conventional (polyclonal) antibody preparations which typically include different antibodies directed against different determinants (epitopes), each monoclonal antibody is directed against a single determinant on the antigen. The modifier “monoclonal” indicates the character of the antibody as being obtained from a substantially homogeneous population of antibodies, and is not to be construed as requiring production of the antibody by any particular method. Monoclonal antibodies can be prepared using a wide variety of techniques known in the art including, e.g., but not limited to, hybridoma, recombinant, and phage display technologies. For example, the monoclonal antibodies to be used in accordance with the present methods may be made by the hybridoma method first described by Kohler et al., Nature 256:495 (1975), or may be made by recombinant DNA methods (See, e.g., U.S. Pat. No. 4,816,567). The “monoclonal antibodies” may also be isolated from phage antibody libraries using the techniques described in Clackson et al., Nature 352:624-628 (1991) and Marks et al., J. Mol. Biol. 222:581-597 (1991), for example.

[0107] As used herein, the term “pharmaceutically-acceptable carrier” is intended to include any and all solvents, dispersion media, coatings, antibacterial and antifungal compounds, isotonic and absorption delaying compounds, and the like, compatible with pharmaceutical administration. Pharmaceutically-acceptable carriers and their formulations are known to one skilled in the art and are described, for example, in Remington's Pharmaceutical Sciences (20^{th} edition, ed. A. Gennaro, 2000, Lippincott, Williams & Wilkins, Philadelphia, Pa.).

[0108] As used herein, the term “polyclonal antibody” means a preparation of antibodies derived from at least two (2) different antibody-producing cell lines. The use of this term includes preparations of at least two (2) antibodies that contain antibodies that specifically bind to different epitopes or regions of an antigen.

[0109] As used herein, the term “polynucleotide” or “nucleic acid” means any RNA or DNA, which may be unmodified or modified RNA or DNA. Polynucleotides include, without limitation, single- and double-stranded DNA, DNA that is a mixture of single- and double-stranded regions, single- and double-stranded RNA, RNA that is mixture of single- and double-stranded regions, and hybrid molecules comprising DNA and RNA that may be single-stranded or, more typically, double-stranded or a mixture of single- and double-stranded regions. In addition, polynucleotide refers to triple-stranded regions comprising RNA or DNA or both RNA and DNA. The term polynucleotide also includes DNAs or RNAs containing one or more modified bases and DNAs or RNAs with backbones modified for stability or for other reasons.

[0110] As used herein, the terms “polypeptide”, “peptide” and “protein” are used interchangeably herein to mean a polymer comprising two or more amino acids joined to each other by peptide bonds or modified peptide bonds, i.e., peptide isosteres. Polypeptide refers to both short chains, commonly referred to as peptides, glycopeptides or oligomers, and to longer chains, generally referred to as proteins. Polypeptides may contain amino acids other than the 20 gene-encoded amino acids. Polypeptides include amino acid sequences modified either by natural processes, such as post-translational processing, or by chemical modification techniques that are well known in the art. Such modifications are well described in basic texts and in more detailed monographs, as well as in a voluminous research literature.

[0111] As used herein, the term “recombinant” when used with reference, e.g., to a cell, or nucleic acid, protein, or vector, indicates that the cell, nucleic acid, protein or vector, has been modified by the introduction of a heterologous nucleic acid or protein or the alteration of a native nucleic acid or protein, or that the material is derived from a cell so modified. Thus, for example, recombinant cells express genes that are not found within the native (non-recombinant) form of the cell or express native genes that are otherwise abnormally expressed, under expressed or not expressed at all.

[0112] As used herein, the term “separate” therapeutic use refers to an administration of at least two active ingredients at the same time or at substantially the same time by different routes.

[0113] As used herein, the term “sequential” therapeutic use refers to administration of at least two active ingredients at different times, the administration route being identical or different. More particularly, sequential use refers to the whole administration of one of the active ingredients before administration of the other or others commences. It is thus possible to administer one of the active ingredients over several minutes, hours, or days before administering the other active ingredient or ingredients. There is no simultaneous treatment in this case.

[0114] As used herein, “specifically binds” refers to a molecule (e.g., an antibody or antigen binding fragment thereof) which recognizes and binds another molecule (e.g., an antigen), but that does not substantially recognize and bind other molecules. The terms “specific binding,” “specifically binds to,” or is “specific for” a particular molecule (e.g., a polypeptide, or an epitope on a polypeptide), as used herein, can be exhibited, for example, by a molecule having a K_{D} for the molecule to which it binds to of about 10⁻⁴ M, 10⁻⁵ M, 10⁻⁶ M, 10⁻⁷ M, 10⁻⁸ M, 10⁻⁹ M, 10⁻¹⁰ M, 10⁻¹¹ M, or 10⁻¹² M. The term “specifically binds” may also refer to binding where a molecule (e.g., an antibody or antigen binding fragment thereof) binds to a particular polypeptide, or an epitope on a particular polypeptide, without substantially binding to any other polypeptide, or polypeptide epitope.

[0115] As used herein, the term “simultaneous” therapeutic use refers to the administration of at least two active ingredients by the same route and at the same time or at substantially the same time.

[0116] As used herein, the term “therapeutic agent” is intended to mean a compound that, when present in an effective amount, produces a desired therapeutic effect on a subject in need thereof.

[0117] “Treating” or “treatment” as used herein covers the treatment of a disease or disorder described herein, in a subject, such as a human, and includes: (i) inhibiting a disease or disorder, i.e., arresting its development; (ii) relieving a disease or disorder, i.e., causing regression of the disorder; (iii) slowing progression of the disorder; and/or (iv) inhibiting, relieving, or slowing progression of one or more symptoms of the disease or disorder. In some embodiments, treatment means that the symptoms associated with the disease are, e.g., alleviated, reduced, cured, or placed in a state of remission.

[0118] It is also to be appreciated that the various modes of treatment of disorders as described herein are intended to mean “substantial,” which includes total but also less than total treatment, and wherein some biologically or medically relevant result is achieved. The treatment may be a continuous prolonged treatment for a chronic disease or a single, or few time administrations for the treatment of an acute condition.

### Heterodimeric Trivalent/Tetravalent Multispecific Antibodies of the Present Technology

[0119] The heterodimeric trivalent/tetravalent multispecific antibodies of the present technology can bind simultaneously to three or four targets that have a distinct structure, e.g., 3-4 different target antigens, 3-4 different epitopes on the same target antigen, or a combination of haptens and target antigens or epitopes on a target antigen. A variety of HDTVS antibodies can be produced using molecular engineering. For example, the HDTVS antibodies disclosed herein utilize combinations of the full immunoglobulin framework (e.g., IgG), and single chain variable fragments (scFvs).

[0120] HDTVS antibodies can be made, for example, by combining and/or engineering heavy chains and/or light chains that recognize different epitopes of the same or different antigen. In some embodiments, the HDTVS protein is trivalent and tri-specific, comprising, for example, an immunoglobulin (e.g., IgG) with a binding site for a first antigen (one V_{H}/V_{L} pair) and a binding site for a second antigen (a different V_{H}/V_{L} pair) and an scFv for a third antigen. In some embodiments, the HDTVS protein is trivalent and bispecific, comprising, for example, an immunoglobulin (e.g., IgG) with two binding sites (two V_{H}/V_{L} pairs) for a first antigen, and a scFv for a second antigen. In some embodiments, the HDTVS protein is tetravalent and tri-specific, comprising, for example, an immunoglobulin (e.g., IgG) with a binding site for a first antigen (one V_{H}/V_{L} pair) and a binding site for a second antigen (a different V_{H}/V_{L} pair) and two identical scFvs for a third antigen. In some embodiments, the HDTVS protein is tetravalent and tri-specific, comprising, for example, an immunoglobulin (e.g., IgG) with two binding sites (two V_{H}/V_{L} pairs) for a first antigen, an scFv for a second antigen and an scFv for a third antigen. In some embodiments, the HDTVS protein is tetravalent and tetra-specific, comprising, for example, an immunoglobulin (e.g., IgG) with a binding site for a first antigen (one V_{H}/V_{L} pair) and a binding site for a second antigen (different V_{H}/V_{L} pair), an scFv for a third antigen and an scFv for a fourth antigen.

[0121] In some embodiments, at least one scFv of the HDTVS antibodies of the present technology binds to an antigen or epitope of a B-cell, a T-cell, a myeloid cell, a plasma cell, or a mast-cell. Additionally or alternatively, in certain embodiments, at least one scFv of the HDTVS antibodies of the present technology binds to an antigen selected from the group consisting of Dabigatran, a4, a4b7, a4b7+aEb7, a5, AXL, BnDOTA, CD11a (LFA-1), CD3, CD4, CD8, CD16, CD19, CD22, CD23, CD25, CD28, CD30 (TNFRSF8), CD33, CD38, CD40, CD40L, CD47, CD49b (a2), CD54 (ICAM-1), CD56, CD74, CD80, CD115 (CSF1R), CD116a (CSF2Ra), CD123, CD134 (OX40), CD137 (41BB), CD152 (CTLA4), CD184 (CXCR4), CD192 (CCR2), CD194 (CCR4), CD195 (CCR5), CD223 (LAG-3), CD252 (OX40L), CD254 (RANKL), CD262 (DR5), CD27, CD200, CD221 (IGF1R), CD248, CD274 (PD-L1), CD275 (ICOS-L), CD278 (ICOS), CD279 (PD-1), CD319 (SLAMF7), CD371 (CLEC12A), MADCAM1, MT1-MMP (MMP14), NKG2A, NRP1,TIGIT, VSIR, KIRDL1/2/3, and KIR2DL2.

[0122] Additionally or alternatively, in certain embodiments, the HDTVS antibodies disclosed herein are capable of binding to cells (e.g., tumor cells) that express a cell surface antigen selected from the group consisting of a2b b3 (Glycoprotein IIb/IIIa), a4, a4b7, a4b7 +aEb7, a5, Activin receptor type-2B, ALK1, Alpha-synuclein, amyloid beta, APP, AXL, Blood Group A, CAIX, CCL-2, CD105 (endoglin), CD115 (CSF1R), CD116a (CSF2Ra), CD123, CD152 (CTLA4), CD184 (CXCR4), CD19, CD192 (CCR2), CD194 (CCR4), CD195 (CCR5), CD20, CD200, CD22, CD221 (IGF1R), CD248, CD25, CD25? (BAFF), CD26, CD262 (DR5), CD276 (B7H3), CD3, CD30 (TNFRSF8), CD319 (SLAMF7), CD33, CD332 (FGFR2), CD350 (FZD10), CD37, CD371 (CLEC12A), CD38, CD4, CD49b (a2), CD51 (a5), CD52, CD56, CD61 (a4b3), CD70, CD73 (NTSE), CD74, CEA, Claudin-18.2, cMET, CRLR, DLL3, DLL4, DNA/histone (H1) complex, EGFR, EpCAM, EGFR-HER3, EGFRvIII, EphA3, ERGT(GalNAc) Tn Antigen, FLT1, FOLR1, frizzled family receptor (FZD), Lewis Y, Lewis X, GCGR, GD2, GD2 α-acetyl, GD3, GM1, GM1 fucosyl, GM2, GPA33, GPNMB, GUCY2C, HER2, HER3, HGFR (cMET), IgHe, IGLF2, Kallikreins, LINGO1, LOXL2, Ly6/PLAUR domain-containing protein 3, MADCAM1, MAG, Mesothelin, MT1-MMP (MMP14), MUC1, Mucin SAC, NaPi2b, NeuGc-GM3, notch, NOTCH2/NOTCH3 receptors, oxLDL, P-selectin, PCSK9, PDGFRA, PDGFRa, phosphatidylserine, polysialic acid, PSMA, PVRL4, RGMA, CD240D Blood group D antigen, root plate-specific spondin 3, serum amyloid P component, STEAP-1, TACSTD2, TGFb, TWEAKR, TYRP1, VEGFR2, VSIR, CD171 (L1CAM), CD19, CD47, pMHC[NY-ESO1], pMHC[MART1], pMHC[MAGEA1], pMHC[Tyrosinase], pMHC[gp100], pMHC[MUC1], pMHC[tax], pMHC[WT-1], pMHC[EBNA-1], pMHC[LMP2], pMHC[hTERT], GPC3, CD80, CD23, and fibronectin extra domain-B.

[0123] Methods for producing the HDTVS antibodies of the present technology include engineered recombinant monoclonal antibodies which have additional cysteine residues so that they crosslink more strongly than the more common immunoglobulin isotypes. See, e.g., FitzGerald et al., Protein Eng. 10(10):1221-1225 (1997). HDTVS recombinant fusion proteins can be engineered by linking two or more different single-chain antibody or antibody fragment segments with the needed dual specificities. See, e.g., Coloma et al., Nature Biotech. 15:159-163 (1997).

[0124] Recombinant methods can be used to produce a variety of fusion proteins. In some embodiments, a HDTVS antibody according to the present technology comprises an immunoglobulin, which immunoglobulin comprises two heavy chains and two light chains, and two scFvs, wherein each scFv is linked to the C-terminal end of one of the two light chains of any immunoglobulin disclosed herein. In various embodiments, scFvs are linked to the light chains via a linker sequence. In some embodiments, a linker is at least 2, 3, 4, 5, 6, 7, 8, 9, 10, 11, 12, 13, 14, 15, 16, 17, 18, 19, 20, 21, 22, 23, 24, 25, 26, 27, 28, 29, 30, 35, 40, 45, 50, 55, 60, 65, 70, 75, 80, 85, 90, 95, 100 or more amino acids in length.

[0125] In some embodiments, a linker is characterized in that it tends not to adopt a rigid three-dimensional structure, but rather provides flexibility to the polypeptide (e.g., first and/or second antigen binding sites). In some embodiments, a linker is employed in a HDTVS antibody described herein based on specific properties imparted to the HDTVS antibody such as, for example, an increase in stability. In some embodiments, a HDTVS antibody of the present technology comprises a G₄S linker (SEQ ID NO: 2508). In certain embodiments, a HDTVS antibody of the present technology comprises a (G₄S)ₙ linker, wherein n is 1, 2, 3, 4, 5, 6, 7, 8, 9, 10, 1 1, 12, 13, 14, 15 or more (SEQ ID NO: 2509).

[0126] Exemplary V_{H} and V_{L} amino acid sequences that may be employed in the HDTVS antibodies of the present technology are provided in Table 1.

TABLE 1

| | | SEQ | | SEQ | | SEQ | | SEQ | | SEQ | | SEQ | | SEQ | | SEQ |
|---|---|---|---|---|---|---|---|---|---|---|---|---|---|---|---|---|
| | | ID | V_{L} | ID | V_{L} | ID | V_{L} | ID | | ID | V_{H} | ID | V_{H} | ID | V_{H} | ID |
| Antigen | V_{L} | NO | CDR1 | NO | CDR2 | NO | CDR3 | NO | V_{H} | NO | CDR1 | NO | CDR2 | NO | CDR3 | NO |
| a2b b3 | DILMTQSPSSM | 1 | QGIS | 2 | YGT | 3 | VQY | 4 | EVQLQQSGAELV | 5 | GFNI | 6 | IDPA | 7 | VRPL | 8 |
| (Glyco- | SVSLGDTVSIT | | SN | | | | AQLP | | KPGASVKLSCTA | | KDT | | NGYT | | YDYY | |
| protein | CHASQGISSNI | | | | | | YT | | SGFNIKDTYVHW | | Y | | | | AMDY | |
| IIb/ | GWLQQKPGKS | | | | | | | | VKQRPEQGLEWI | | | | | | | |
| IIIa) | FMGLIYYGTN | | | | | | | | GRIDPANGYTKY | | | | | | | |
| | LVDGVPSRFS | | | | | | | | DPKFQGKATITA | | | | | | | |
| | GSGSGADYSL | | | | | | | | DTSSNTAYLQLS | | | | | | | |
| | TISSLDSEDFA | | | | | | | | SLTSEDTAVYYC | | | | | | | |
| | DYYCVQYAQ | | | | | | | | VRPLYDYYAMD | | | | | | | |
| | LPYTFGGGTK | | | | | | | | YWGQGTSVTVSS | | | | | | | |
| | LEIK | | | | | | | | | | | | | | | |
| a2b b3 | DIQMTQTPSTL | 9 | QDIN | 10 | YTS | 11 | QQG | 12 | QVQLVQSGAEV | 13 | GYA | 14 | IYPG | 15 | ARRD | 16 |
| (Glyco- | SASVGDRVTIS | | NY | | | | NTLP | | KKPGSSVKVSCK | | FTNY | | SGGT | | GNYG | |
| protein | CRASQDINNY | | | | | | WT | | ASGYAFTNYLIE | | L | | | | WFAY | |
| IIb/ | LNWYQQKPG | | | | | | | | WVRQAPGQGLE | | | | | | | |
| IIIa) | KAPKLLIYYTS | | | | | | | | WIGVIYPGSGGT | | | | | | | |
| | TLHSGVPSRFS | | | | | | | | NYNEKFKGRVTL | | | | | | | |
| | GSGSGTDYTL | | | | | | | | TVDESTNTAYME | | | | | | | |
| | TISSLQPDDFA | | | | | | | | LSSLRSEDTAVY | | | | | | | |
| | TYFCQQGNTL | | | | | | | | FCARRDGNYGWF | | | | | | | |
| | PWTFGQGTKV | | | | | | | | AYWGQGTLVTV | | | | | | | |
| | EVK | | | | | | | | SS | | | | | | | |
| a4 | DIQMTQSPSSL | 17 | QDIN | 18 | YTS | 19 | LQY | 20 | QVQLVQSGAEV | 21 | GFNI | 22 | IDPA | 23 | AREG | 24 |
| | SASVGDRVTIT | | KY | | | | DNL | | KKPGASVKVSCK | | KDT | | NGYT | | YYGN | |
| | CKTSQDINKY | | | | | | WT | | ASGFNIKDTYIH | | Y | | | | YGVY | |
| | MAWYQQTPG | | | | | | | | WVRQAPGQRLE | | | | | | AMDY | |
| | KAPRLLIHYTS | | | | | | | | WMGRIDPANGY | | | | | | | |
| | ALQPGIPSRFS | | | | | | | | TKYDPKFQGRVT | | | | | | | |
| | GSGSGRDYTF | | | | | | | | ITADTSASTAYM | | | | | | | |
| | TISSLQPEDIA | | | | | | | | ELSSLRSEDEAV | | | | | | | |
| | TYYCLQYDNL | | | | | | | | YYCAREGYYGN | | | | | | | |
| | WTFGQGTKVE | | | | | | | | YGVYAMDYWG | | | | | | | |
| | IK | | | | | | | | QGTLVTVSS | | | | | | | |
| a4b7 | DVVMTQSPLS | 25 | QSLA | 26 | GIS | 27 | LQGT | 28 | QVQLVQSGAEV | 29 | GYTF | 30 | IDPS | 31 | ARGG | 32 |
| | LPVTPGEPASI | | KSYG | | | | HQP | | KKPGASVKVSCK | | TSY | | ESNT | | YDGW | |
| | SCRSSQSLAKS | | NTY | | | | YT | | GSGYTFTSYWM | | W | | | | DYAI | |
| | YGNTYLSWYL | | | | | | | | HWVRQAPGQRL | | | | | | DY | |
| | QKPGQSPQLLI | | | | | | | | EWIGEIDPSESN | | | | | | | |
| | YGISNRFSGVP | | | | | | | | TNYNQKFKGRVT | | | | | | | |
| | DRFSGSGSGT | | | | | | | | LTVDISASTAYM | | | | | | | |
| | DFTLKISRVEA | | | | | | | | ELSSLRSEDTAV | | | | | | | |
| | EDVGVYYCLQ | | | | | | | | YYCARGGYDGWD | | | | | | | |
| | GTHQPYTFGQ | | | | | | | | YAIDYWGQGTL | | | | | | | |
| | GTKVEIK | | | | | | | | VTVSS | | | | | | | |
| a4b7 + | DIQMTQSPSSL | 33 | ESVD | 34 | YAS | 35 | QQG | 36 | EVQLVESGGGLV | 37 | GFFI | 38 | ISYS | 39 | ARTG | 40 |
| aEb7 | SASVGDRVTIT | | DL | | Q | | NSLP | | QPGGSLRLSCAA | | TNN | | GST | | SSGY | |
| | CRASESVDDL | | | | | | NT | | SGFFITNNYWGW | | Y | | | | FDF | |
| | LHWYQQKPG | | | | | | | | VRQAPGKGLEW | | | | | | | |
| | KAPKLLIKYAS | | | | | | | | VGYISYSGSTSY | | | | | | | |
| | QSISGVPSRFS | | | | | | | | NPSLKSRFTISR | | | | | | | |
| | GSGSGTDFTLT | | | | | | | | DTSKNTFYLQMN | | | | | | | |
| | ISSLQPEDFAT | | | | | | | | SLRAEDTAVYYC | | | | | | | |
| | YYCQQGNSLP | | | | | | | | ARTGSSGYFDFW | | | | | | | |
| | NTFGQGTKVE | | | | | | | | GQGTLVTVSS | | | | | | | |
| | IK | | | | | | | | | | | | | | | |
| a5 | EIVLTQSPATL | 41 | QSVS | 42 | DAS | 43 | QQRS | 44 | QVQLVESGGGV | 45 | GFTF | 46 | ISFD | 47 | AREA | 48 |
| | SLSPGERATLS | | SY | | | | NWP | | VQPGRSRRLSCA | | SRYT | | GSNK | | RGSY | |
| | CRASQSVSSY | | | | | | PFT | | ASGFTFSRYTMH | | | | | | AFDI | |
| | LAWYQQKPG | | | | | | | | WVRQAPGKGLE | | | | | | | |
| | QAPRLLIYDAS | | | | | | | | WVAVISFDGSNK | | | | | | | |
| | NRATGIPARFS | | | | | | | | YYVDSVKGRFTI | | | | | | | |
| | GSGSGTDFTLT | | | | | | | | SRDNSENTLYLQ | | | | | | | |
| | ISSLEPEDFAV | | | | | | | | VNILRAEDTAVY | | | | | | | |
| | YYCQQRSNWP | | | | | | | | YCAREARGSYAF | | | | | | | |
| | PFTFGPGTKV | | | | | | | | DIWGQGTMVTV | | | | | | | |
| | DIK | | | | | | | | SS | | | | | | | |
| Activin | QSALTQPASV | 49 | SSDV | 50 | GVS | 51 | GTFA | 52 | QVQLVQSGAEV | 53 | GYTF | 54 | INPV | 55 | ARGG | 56 |
| recep- | SGSPGQSITIS | | GSYN | | | | GGS | | KKPGASVKVSCK | | TSSY | | SGST | | WFDY | |
| tor | CTGTSSDVGSY | | Y | | | | YYG | | ASGYTFTSSYIN | | | | | | | |
| type-2B | NYVNWYQQH | | | | | | V | | WVRQAPGQGLE | | | | | | | |
| | PGKAPKLMIY | | | | | | | | WMGTINPVSGST | | | | | | | |
| | GVSKRPSGVS | | | | | | | | SYAQKFQGRVT | | | | | | | |
| | NRFSGSKSGN | | | | | | | | MTRDTSISTAYM | | | | | | | |
| | TASLTISGLQA | | | | | | | | ELSRLRSDDTAV | | | | | | | |
| | EDEADYYCGT | | | | | | | | YYCARGGWFDY | | | | | | | |
| | FAGGSYYGVF | | | | | | | | WGQGTLVTVSS | | | | | | | |
| | GGGTKLTVL | | | | | | | | | | | | | | | |
| ALK1 | EIVLTQSPGTL | 57 | QSVS | 58 | GTS | 59 | QQY | 60 | QVQLQESGPGLV | 61 | GGSI | 62 | IYYS | 63 | ARES | 64 |
| | SLSPGERATLS | | SSY | | | | GSSP | | KPSQTLSLTCTV | | SSGE | | GST | | VAGF | |
| | CRASQSVSSSY | | | | | | IT | | SGGSISSGEYYW | | YY | | | | DY | |
| | LAWYQQKPG | | | | | | | | NWIRQHPGKGLE | | | | | | | |
| | QAPRLLIYGTS | | | | | | | | WIGYIYYSGSTY | | | | | | | |
| | SRATGIPDRFS | | | | | | | | YNPSLKSRVTIS | | | | | | | |
| | GSGSGTDFTLT | | | | | | | | VDTSKNQFSLKL | | | | | | | |
| | ISRLEPEDFAV | | | | | | | | SSVTAADTAVYY | | | | | | | |
| | YYCQQYGSSPI | | | | | | | | CARESVAGFDYW | | | | | | | |
| | TFGQGTRLEIK | | | | | | | | GQGTLVTVSS | | | | | | | |
| Alpha- | DIQMTQSPSSL | 65 | QTLL | 66 | WAS | 67 | QQY | 68 | EVQLVESGGGLV | 69 | GFTF | 70 | ISSG | 71 | ARGG | 72 |
| synu- | SASVGDRVTIT | | YSSN | | | | YSYP | | QPGGSLRLSCAA | | SNY | | GGST | | AGID | |
| clein | CKSIQTLLYSS | | QKNY | | | | LT | | SGFTFSNYGMSW | | G | | | | YW | |
| | NQKNYLAWF | | | | | | | | VRQAPGKGLEW | | | | | | | |
| | QQKPGKAPKL | | | | | | | | VASISSGGGSTY | | | | | | | |
| | LIYWASIRKSG | | | | | | | | YPDNVKGRFTIS | | | | | | | |
| | VPSRFSGSGSG | | | | | | | | RDDAKNSLYLQM | | | | | | | |
| | TDFTLTISSLQ | | | | | | | | NSLRAEDTAVYY | | | | | | | |
| | PEDLATYYCQ | | | | | | | | CARGGAGIDYW | | | | | | | |
| | QYYSYPLTFG | | | | | | | | GQGTLVTVSS | | | | | | | |
| | GGTKLEIK | | | | | | | | | | | | | | | |
| amyloid | DVVMTQSPLS | 73 | QSLL | 74 | LYS | 75 | WQG | 76 | EVQLLESGGGLV | 77 | GFTF | 78 | IRSG | 79 | VRYD | 80 |
| beta | LPVTPGEPASI | | DSDG | | | | THFP | | QPGGSLRLSCAA | | SNY | | GGRT | | HYSG | |
| | SCKSSQSLLDS | | KTY | | | | RT | | SGFTFSNYGMSW | | G | | | | SSDY | |
| | DGKTYLNWLL | | | | | | | | VRQAPGKGLEW | | | | | | | |
| | QKPGQSPQRLI | | | | | | | | VASIRSGGGRTY | | | | | | | |
| | YLVSKLDSGV | | | | | | | | YSDNVKGRFTIS | | | | | | | |
| | PDRFSGSGSGT | | | | | | | | RDNSKNTLYLQ | | | | | | | |
| | DFTLKISRVEA | | | | | | | | MNSLRAEDTAV | | | | | | | |
| | EDVGVYYCW | | | | | | | | YYCVRYDHYSGS | | | | | | | |
| | QGTHFPRTFG | | | | | | | | SDYWGQGTLVT | | | | | | | |
| | QGTKVEIK | | | | | | | | VSS | | | | | | | |
| amyloid | DVVMTQSPLS | 81 | qSLI | 82 | KVS | 83 | SQST | 84 | EVQLVESGGGLV | 85 | GFTF | 86 | INSV | 87 | ASGD | 88 |
| beta | LPVTLGQPASI | | YSDG | | | | HVP | | QPGGSLRLSCAA | | SRYS | | GNST | | Y | |
| | SCRSSQSLIYS | | NAY | | | | WT | | SGFTFSRYSMSW | | | | | | | |
| | DGNAYLHWF | | | | | | | | VRQAPGKGLELV | | | | | | | |
| | LQKPGQSPRL | | | | | | | | AQINSVGNSTYY | | | | | | | |
| | LIYKVSNRFSG | | | | | | | | PDTVKGRFTISR | | | | | | | |
| | VPDRFSGSGS | | | | | | | | DNAKNTLYLQMN | | | | | | | |
| | GTDFTLKISRV | | | | | | | | SLRAEDTAVYYC | | | | | | | |
| | EAEDVGVYYC | | | | | | | | ASGDYWGQGTL | | | | | | | |
| | SQSTHVPWTF | | | | | | | | VTVSS | | | | | | | |
| | GQGTKVEIK | | | | | | | | | | | | | | | |
| amyloid | DIVMTQSPLSL | 89 | QSLV | 90 | KVS | 91 | SQST | 92 | EVQLVESGGGLV | 93 | GFTF | 94 | INSN | 95 | ASGD | 96 |
| beta | PVTPGEPASIS | | YSNG | | | | HVP | | QPGGSLRLSCAA | | SSYG | | GGST | | YW | |
| | CRSSQSLVYS | | DTY | | | | WT | | SGFTFSSYGMSW | | | | | | | |
| | NGDTYLHWY | | | | | | | | VRQAPGKGLELV | | | | | | | |
| | LQKPGQSPQL | | | | | | | | ASINSNGGSTYY | | | | | | | |
| | LIYKVSNRFSG | | | | | | | | PDSVKGRFTISR | | | | | | | |
| | VPDRFSGSGS | | | | | | | | DNAKNSLYLQMN | | | | | | | |
| | GTDFTLKISRV | | | | | | | | SLRAEDTAVYYC | | | | | | | |
| | EAEDVGVYYC | | | | | | | | ASGDYWGQGTT | | | | | | | |
| | SQSTHVPWTF | | | | | | | | VTVSS | | | | | | | |
| | GQGTKVEIK | | | | | | | | | | | | | | | |
| amyloid | DVVMTQSPLS | 97 | QSLL | 98 | QIS | 99 | LQGT | 100 | QVQLVQSGAEV | 101 | GYY | 102 | IDPA | 103 | ASLY | 104 |
| beta | LPVTLGQPASI | | YSD | | | | HYP | | KKPGASVKVSCK | | TEA | | TGNT | | SLPV | |
| | SCKSSQSLLYS | | AKTY | | | | VL | | ASGYYTEAYYIH | | YY | | | | Y | |
| | DAKTYLNWF | | | | | | | | WVRQAPGQGLE | | | | | | | |
| | QQRPGQSPRR | | | | | | | | WMGRIDPATGNT | | | | | | | |
| | LIYQISRLDPG | | | | | | | | KYAPRLQDRVT | | | | | | | |
| | VPDRFSGSGS | | | | | | | | MTRDTSTSTVYM | | | | | | | |
| | GTDFTLKISRV | | | | | | | | ELSSLRSEDTAV | | | | | | | |
| | EAEDVGVYYC | | | | | | | | YYCASLYSLPVY | | | | | | | |
| | LQGTHYPVLF | | | | | | | | WGQGTTVTVSS | | | | | | | |
| | GQGTRLEIK | | | | | | | | | | | | | | | |
| amyloid | DIQMTQSPSSL | 105 | QSIS | 106 | AAS | 107 | QQS | 108 | QVQLVESGGGV | 109 | GFAF | 110 | IWFD | 111 | ARDRG | 112 |
| beta | SASVGDRVTIT | | SY | | | | YSTP | | VQPGRSLRLSCA | | SSYG | | GTKK | | IGARR | |
| | CRASQSISSYL | | | | | | LT | | ASGFAFSSYGMH | | | | | | GPYYM | |
| | NWYQQKPGK | | | | | | | | WVRQAPGKGLE | | | | | | DV | |
| | APKLLIYAASS | | | | | | | | WVAVIWFDGTK | | | | | | | |
| | LQSGVPSRFSG | | | | | | | | KYYTDSVKGRFT | | | | | | | |
| | SGSGTDFTLTI | | | | | | | | ISRDNSKNTLYL | | | | | | | |
| | SSLQPEDFATY | | | | | | | | QMNTLRAEDTA | | | | | | | |
| | YCQQSYSTPL | | | | | | | | VYYCARDRGIGA | | | | | | | |
| | TFGGGTKVEI | | | | | | | | RRGPYYMDVWG | | | | | | | |
| | K | | | | | | | | KGTTVTVSS | | | | | | | |
| APP | DIVLTQSPATL | 113 | QSVS | 114 | GAS | 115 | LQIY | 116 | QVELVESGGGLV | 117 | GFTF | 118 | INAS | 119 | ARGKG | 120 |
| | SLSPGERATLS | | SSY | | | | NMPI | | QPGGSLRLSCAA | | SSYA | | TRT | | GNTH | |
| | CRASQSVSSSY | | | | | | T | | SGFTFSSYAMSW | | | | | | KPYG | |
| | LAWYQQKPG | | | | | | | | VRQAPGKGLEW | | | | | | YVRY | |
| | QAPRLLIYGAS | | | | | | | | VSAINASGTRTY | | | | | | FDV | |
| | SRATGVPARF | | | | | | | | YADSVKGRFTIS | | | | | | | |
| | SGSGSGTDFTL | | | | | | | | RDNSKNTLYLQ | | | | | | | |
| | TISSLEPEDFA | | | | | | | | MNSLRAEDTAV | | | | | | | |
| | TYYCLQIYNM | | | | | | | | YYCARGKGNTH | | | | | | | |
| | PITFGQGTKVE | | | | | | | | KPYGYVRYFDV | | | | | | | |
| | IK | | | | | | | | WGQGTLVTVSS | | | | | | | |
| AXL | EIVLTQSPGTL | 121 | QSVS | 122 | GAS | 123 | QQY | 124 | EVQLLESGGGLV | 125 | GFTF | 126 | TSGS | 127 | AKIWI | 128 |
| | SLSPGERATLS | | SSY | | | | GSSP | | QPGGSLRLSCAA | | SSYA | | GAST | | AFDI | |
| | CRASQSVSSSY | | | | | | YT | | SGFTFSSYAMNW | | | | | | | |
| | LAWYQQKPG | | | | | | | | VRQAPGKGLEW | | | | | | | |
| | QAPRLLIYGAS | | | | | | | | VSTTSGSGASTY | | | | | | | |
| | SRATGIPDRFS | | | | | | | | YADSVKGRFTIS | | | | | | | |
| | GSGSGTDFTLT | | | | | | | | RDNSKNTLYLQ | | | | | | | |
| | ISRLEPEDFAV | | | | | | | | MNSLRAEDTAV | | | | | | | |
| | YYCQQYGSSP | | | | | | | | YYCAKIWIAFDI | | | | | | | |
| | YTFGQGTKLEI | | | | | | | | WGQGTMVTVSS | | | | | | | |
| | K | | | | | | | | | | | | | | | |
| Blood | DIQMTQTTSSL | 129 | QDIN | 130 | YTS | 131 | QQG | 132 | QVQLQQPGAELV | 133 | GYN | 134 | IYPG | 135 | AGQY | 136 |
| group A | SASLGDRVTIS | | NY | | | | NTLP | | KPGTSVKLSCKA | | FTSY | | SGIT | | GNLW | |
| | CRASQDINNY | | | | | | WT | | SGYNFTSYWINW | | W | | | | FAY | |
| | LNWYQQKPD | | | | | | | | VKLRPGQGLEWI | | | | | | | |
| | GTVKLLIHYTS | | | | | | | | GDIYPGSGITNY | | | | | | | |
| | RLHSGVPSRFS | | | | | | | | NEKFKSKATLTV | | | | | | | |
| | GSGSGTDYSL | | | | | | | | DTSSSTAYMQLS | | | | | | | |
| | TISNLEQEDIA | | | | | | | | SLASEDSALYYC | | | | | | | |
| | TYFCQQGNTL | | | | | | | | AGQYGNLWFAYW | | | | | | | |
| | PWTFGGGTKL | | | | | | | | GQGTLVTVSS | | | | | | | |
| | EIK | | | | | | | | | | | | | | | |
| BnDOTA | QAVVIQESAL | 137 | TGAV | 138 | GHN | 139 | ALW | 140 | HVKLQESGPGLV | 141 | GFSL | 142 | IWSG | 143 | ARRG | 144 |
| | TTPPGETVTLT | | TASN | | | | YSD | | QPSQSLSLTCTV | | TDY | | GGT | | SYPY | |
| | CGSSTGAVTA | | Y | | | | HWV | | SGFSLTDYGVHW | | G | | | | NYFD | |
| | SNYANWVQE | | | | | | IGGG | | VRQSPGKGLEWL | | | | | | A | |
| | KPDHCFTGLIG | | | | | | | | GVIWSGGGTAYN | | | | | | | |
| | GHNNRPPGVP | | | | | | | | TALISRLNIYRD | | | | | | | |
| | ARFSGSLIGDK | | | | | | | | NSKNQVFLEMNS | | | | | | | |
| | AALTIAGTQTE | | | | | | | | LQAEDTAMYYCA | | | | | | | |
| | DEAIYFCALW | | | | | | | | RRGSYPYNYFDA | | | | | | | |
| | YSDHWVIGGG | | | | | | | | WGCGTTVTVSS | | | | | | | |
| | TRLTVL | | | | | | | | | | | | | | | |
| CAIX | DIVMTQSQRF | 145 | QNVV | 146 | SAS | 147 | QQY | 148 | DVKLVESGGGLV | 149 | GFTF | 150 | INSD | 151 | ARHR | 152 |
| | MSTTVGDRVS | | SA | | | | SNYP | | KLGGSLKLSCAA | | SNY | | GGIT | | SGYF | |
| | ITCKASQNVV | | | | | | WT | | SGFTFSNYYMSW | | Y | | | | SMDY | |
| | SAVAWYQQK | | | | | | | | VRQTPEKRLELV | | | | | | | |
| | PGQSPKLLIYS | | | | | | | | AAINSDGGITYY | | | | | | | |
| | ASNRYTGVPD | | | | | | | | LDTVKGRFTISR | | | | | | | |
| | RFTGSGSGTDF | | | | | | | | DNAKNTLYLQMS | | | | | | | |
| | TLTISNMQSED | | | | | | | | SLKSEDTALFYC | | | | | | | |
| | LADFFCQQYS | | | | | | | | ARHRSGYFSMDY | | | | | | | |
| | NYPWTFGGGT | | | | | | | | WGQGTSVTVSS | | | | | | | |
| | KLEIK | | | | | | | | | | | | | | | |
| CCL-2 | EIVLTQSPATL | 153 | QSVS | 154 | DAS | 155 | HQYI | 156 | QVQLVQSGAEV | 157 | GGTF | 158 | IIPI | 159 | ARYD | 160 |
| | SLSPGERATLS | | DAY | | | | QLHS | | KKPGSSVKVSCK | | SSYG | | FGTA | | GIYG | |
| | CRASQSVSDA | | | | | | FT | | ASGGTFSSYGIS | | | | | | ELDF | |
| | YLAWYQQKP | | | | | | | | WVRQAPGQGLE | | | | | | | |
| | GQAPRLLIYD | | | | | | | | WMGGIIPIFGTA | | | | | | | |
| | ASSRATGVPA | | | | | | | | NYAQKFQGRVTI | | | | | | | |
| | RFSGSGSGTDF | | | | | | | | TADESTSTAYME | | | | | | | |
| | TLTISSLEPED | | | | | | | | LSSLRSEDTAVY | | | | | | | |
| | FAVYYCHQYIQ | | | | | | | | YCARYDGIYGEL | | | | | | | |
| | LHSFTFGQGT | | | | | | | | DFWGQGTLVTVS | | | | | | | |
| | KVEIK | | | | | | | | S | | | | | | | |
| CD105 | QIVLSQSPAIL | 161 | SSVS | 162 | ATS | 163 | QQW | 164 | EVKLEESGGGLV | 165 | GFTF | 166 | IRSK | 167 | TRWR | 168 |
| (endo- | SASPGEKVTMT | | Y | | | | SSNP | | QPGGSMKLSCAA | | SDA | | ASNH | | RFFD | |
| glin) | CRASSSVSYM | | | | | | LT | | SGFTFSDAWMD | | W | | AT | | S | |
| | HWYQQKPGSS | | | | | | | | WVRQSPEKGLE | | | | | | | |
| | PKPWIYATSN | | | | | | | | WVAEIRSKASNH | | | | | | | |
| | LASGVPVRFS | | | | | | | | ATYYAESVKGRF | | | | | | | |
| | GSGSGTSYSLT | | | | | | | | TISRDDSKSSVY | | | | | | | |
| | ISRVEAEDAAT | | | | | | | | LQMNSLRAEDTG | | | | | | | |
| | YYCQQWSSNP | | | | | | | | IYYCTRWRRFFD | | | | | | | |
| | LTFGAGTKLE | | | | | | | | SWGQGTTLTVSS | | | | | | | |
| | LK | | | | | | | | | | | | | | | |
| CD115 | EIVLTQSPATL | 169 | QSVD | 170 | AAS | 171 | HLSN | 172 | QVQLVQSGAEV | 173 | GYTF | 174 | INPY | 175 | ARES | 176 |
| (CSF1R) | SLSPGERATLS | | YDGD | | | | EDLS | | KKPGSSVKVSCK | | TDN | | NGGT | | PYFS | |
| | CKASQSVDYD | | NY | | | | T | | ASGYTFTDNYMI | | Y | | | | NLYV | |
| | GDNYMNWYQ | | | | | | | | WVRQAPGQGLE | | | | | | MDYW | |
| | QKPGQAPRLLI | | | | | | | | WMGDINPYNGG | | | | | | | |
| | YAASNLESGIP | | | | | | | | TTFNQKFKGRVT | | | | | | | |
| | ARFSGSGSGT | | | | | | | | ITADKSTSTAYM | | | | | | | |
| | DFTLTISSLEP | | | | | | | | ELSSLRSEDTAV | | | | | | | |
| | EDFAVYYCHLS | | | | | | | | YYCARESPYFSN | | | | | | | |
| | NEDLSTFGGG | | | | | | | | LYVMDYWGQGT | | | | | | | |
| | TKVEIK | | | | | | | | LVTVSS | | | | | | | |
| CD116a | QSVLTQPPSVS | 177 | GSNI | 178 | HNN | 179 | ATVE | 180 | QVQLVQSGAEV | 181 | GYT | 182 | FDPE | 183 | AIVG | 184 |
| (CSF2 | GAPGQRVTISC | | GAPY | | | | AGLS | | KKPGASVKVSCK | | LTEL | | ENEI | | SFSP | |
| Ra) | TGSGSNIGAPY | | D | | | | GSV | | VSGYTLTELSIH | | S | | | | LTLG | |
| | DVSWYQQLPG | | | | | | | | WVRQAPGKGLE | | | | | | L | |
| | TAPKLLIYHN | | | | | | | | WMGGFDPEENEI | | | | | | | |
| | NKRPSGVPDR | | | | | | | | VYAQRFQGRVT | | | | | | | |
| | FSGSKSGTSAS | | | | | | | | MTEDTSTDTAY | | | | | | | |
| | LAITGLQAEDE | | | | | | | | MELSSLRSEDTA | | | | | | | |
| | ADYYCATVEA | | | | | | | | VYYCAIVGSFSP | | | | | | | |
| | GLSGSVFGGG | | | | | | | | LTLGLWGQGTMV | | | | | | | |
| | TKLTVL | | | | | | | | TVSS | | | | | | | |
| CD11a | DIQMTQSPSSL | 185 | KTISKY | 186 | SGS | 187 | QQH | 188 | EVQLVESGGGLV | 189 | GYSF | 190 | IHPS | 191 | ARGI | 192 |
| (LFA-1) | SASVGDRVTIT | | | | | | NEYP | | QPGGSLRLSCAA | | TGH | | DSET | | YFYG | |
| | CRASKTISKYL | | | | | | LT | | SGYSFTGHWMN | | W | | | | TTYF | |
| | AWYQQKPGK | | | | | | | | WVRQAPGKGLE | | | | | | DYW | |
| | APKLLIYSGST | | | | | | | | WVGMIHPSDSET | | | | | | | |
| | LQSGVPSRFSG | | | | | | | | RYNQKFKDRFTI | | | | | | | |
| | SGSGTDFTLTI | | | | | | | | SVDKSKNTLYLQ | | | | | | | |
| | SSLQPEDFATY | | | | | | | | MNSLRAEDTAV | | | | | | | |
| | YCQQHNEYPL | | | | | | | | YYCARGIYFYGT | | | | | | | |
| | TFGQGTKVEI | | | | | | | | TYFDYWGQGTL | | | | | | | |
| | K | | | | | | | | VTVSS | | | | | | | |
| CD123 | DFVMTQSPSS | 193 | QSLL | 194 | WAS | 195 | QND | 196 | EVQLQQSGPELV | 197 | GYTF | 198 | IIPS | 199 | TRSH | 200 |
| | LTVTAGEKVT | | NSGN | | | | YSYP | | KPGASVKMSCK | | TDY | | N | | LLRA | |
| | MSCKSSQSLL | | QKNY | | | | YT | | ASGYTFTDYYM | | Y | | GAT | | SWFA | |
| | NSGNQKNYLT | | | | | | | | KWVKQSHGKSL | | | | | | Y | |
| | WYLQKPGQPP | | | | | | | | EWIGDIIPSNGA | | | | | | | |
| | KLLIYWASTR | | | | | | | | TFYNQKFKGKAT | | | | | | | |
| | ESGVPDRFTGS | | | | | | | | LTVDRSSSTAYM | | | | | | | |
| | GSGTDFTLTIS | | | | | | | | HLNSLTSEDSAV | | | | | | | |
| | SVQAEDLAVY | | | | | | | | YYCTRSHLLRAS | | | | | | | |
| | YCQNDYSYPY | | | | | | | | WFAYWGQGTLVT | | | | | | | |
| | TFGGGTKLEIK | | | | | | | | VSA | | | | | | | |
| CD123 | QAVVTQEPSL | 201 | TGAV | 202 | GTN | 203 | ALW | 204 | EVQLVESGGGLV | 205 | GFTF | 206 | IRSK | 207 | VRHG | 208 |
| | TVSPGGTVTL | | TTSN | | | | YSNL | | QPGGSLRLSCAA | | STYA | | YNNY | | NFGN | |
| | TCRSSTGAVT | | Y | | | | WV | | SGFTFSTYAMNW | | | | AT | | SYVS | |
| | TSNYANWVQ | | | | | | | | VRQAPGKGLEW | | | | | | WFAY | |
| | QKPGQAPRGL | | | | | | | | VGRIRSKYNNYA | | | | | | | |
| | IGGTNKRAPW | | | | | | | | TYYADSVKDRFT | | | | | | | |
| | TPARFSGSLLG | | | | | | | | ISRDDSKNSLYL | | | | | | | |
| | GKAALTITGA | | | | | | | | QMNSLKTEDTAV | | | | | | | |
| | QAEDEADYYC | | | | | | | | YYCVRHGNFGNS | | | | | | | |
| | ALWYSNLWV | | | | | | | | YVSWFAYWGQGT | | | | | | | |
| | FGGGTKLTVL | | | | | | | | LVTVSS | | | | | | | |
| CD134 | DIQMTQSPSSL | 209 | QDIS | 210 | YTS | 211 | QQG | 212 | EVQLVQSGAEVK | 213 | GYTF | 214 | MYPD | 215 | VLAP | 216 |
| (OX40) | SASVGDRVTIT | | NY | | | | HTLP | | KPGASVKVSCKA | | TDSY | | NGDS | | RWYF | |
| | CRASQDISNYL | | | | | | PT | | SGYTFTDSYMSW | | | | | | SVW | |
| | NWYQQKPGK | | | | | | | | VRQAPGQGLEWI | | | | | | | |
| | APKLLIYYTSR | | | | | | | | GDMYPDNGDSS | | | | | | | |
| | LRSGVPSRFSG | | | | | | | | YNQKFRERVTIT | | | | | | | |
| | SGSGTDFTLTI | | | | | | | | RDTSTSTAYLEL | | | | | | | |
| | SSLQPEDFATY | | | | | | | | SSLRSEDTAVYY | | | | | | | |
| | YCQQGHTLPP | | | | | | | | CVLAPRWYFSVW | | | | | | | |
| | TFGQGTKVEI | | | | | | | | GQGTLVTVSS | | | | | | | |
| | K | | | | | | | | | | | | | | | |
| CD137 | SYELTQPPSVS | 217 | NIGD | 218 | QDK | 219 | ATYT | 220 | EVQLVQSGAEVK | 221 | GYSF | 222 | IYPG | 223 | ARGY | 224 |
| (41BB) | VSPGQTASITC | | QY | | | | GFGS | | KPGESLRISCKG | | STY | | DSYT | | GIFD | |
| | SGDNIGDQYA | | | | | | LAV | | SGYSFSTYWISW | | W | | | | Y | |
| | HWYQQKPGQ | | | | | | | | VRQMPGKGLEWM | | | | | | | |
| | SPVLVIYQDK | | | | | | | | GKIYPGDSYTNY | | | | | | | |
| | NRPSGIPERFS | | | | | | | | SPSFQGQVTISA | | | | | | | |
| | GSNSGNTATL | | | | | | | | DKSISTAYLQWS | | | | | | | |
| | TISGTQAMDE | | | | | | | | SLKASDTAMYYC | | | | | | | |
| | ADYYCATYTG | | | | | | | | ARGYGIFDYWGQ | | | | | | | |
| | FGSLAVFGGG | | | | | | | | GTLVTVSS | | | | | | | |
| | TKLTVL | | | | | | | | | | | | | | | |
| CD137 | EIVLTQSPATL | 225 | QSVS | 226 | DAS | 227 | QQRS | 228 | QVQLQQWGAGL | 229 | GGSF | 230 | INHG | 231 | ARDY | 232 |
| (41BB) | SLSPGERATLS | | SY | | | | NWP | | LKPSETLSLTCA | | SGY | | GYV | | GPGN | |
| | CRASQSVSSY | | | | | | PALT | | VYGGSFSGYYWS | | Y | | | | YDWY | |
| | LAWYQQKPG | | | | | | | | WIRQSPEKGLEW | | | | | | FDL | |
| | QAPRLLIYDAS | | | | | | | | IGEINHGGYVTY | | | | | | | |
| | NRATGIPARFS | | | | | | | | NPSLESRVTISV | | | | | | | |
| | GSGSGTDFTLT | | | | | | | | DTSKNQFSLKLS | | | | | | | |
| | ISSLEPEDFAV | | | | | | | | SVTAADTAVYYC | | | | | | | |
| | YYCQQRSNWP | | | | | | | | ARDYGPGNYDWY | | | | | | | |
| | PALTFCGGTK | | | | | | | | FDLWGRGTLVTV | | | | | | | |
| | VEIK | | | | | | | | SS | | | | | | | |
| CD152 | DIQMTQSPSSL | 233 | QSIN | 234 | AAS | 235 | QQY | 236 | QVQLVESGGGV | 237 | GFTF | 238 | IWYD | 239 | ARDP | 240 |
| (CTLA4) | SASVGDRVTIT | | SY | | | | YSTP | | VQPGRSLRLSCA | | SSYG | | GSNK | | RGAT | |
| | CRASQSINSYL | | | | | | FT | | ASGFTFSSYGMH | | | | | | LYYY | |
| | DWYQQKPGK | | | | | | | | WVRQAPGKGLE | | | | | | YYGM | |
| | APKLLIYAASS | | | | | | | | WVAVIWYDGSN | | | | | | DV | |
| | LQSGVPSRFSG | | | | | | | | KYYADSVKGRFT | | | | | | | |
| | SGSGTDFTLTI | | | | | | | | ISRDNSKNTLYL | | | | | | | |
| | SSLQPEDFATY | | | | | | | | QMNSLRAEDTA | | | | | | | |
| | YCQQYYSTPF | | | | | | | | VYYCARDPRGAT | | | | | | | |
| | TFGPGTKVEIK | | | | | | | | LYYYYYGMDVW | | | | | | | |
| | | | | | | | | | GQGTTVTVSS | | | | | | | |
| CD152 | EIVLTQSPGTL | 241 | QSVGS | 242 | GAF | 243 | QQY | 244 | QVQLVESGGGV | 245 | GFTF | 246 | ISYD | 247 | ARTG | 248 |
| (CTLA4) | SLSPGERATLS | | SY | | | | GSSP | | VQPGRSLRLSCA | | SSYT | | GNNK | | WLGP | |
| | CRASQSVGSS | | | | | | WT | | ASGFTFSSYTMH | | | | | | FDY | |
| | YLAWYQQKP | | | | | | | | WVRQAPGKGLE | | | | | | | |
| | GQAPRLLIYG | | | | | | | | WVTFISYDGNNK | | | | | | | |
| | AFSRATGIPDR | | | | | | | | YYADSVKGRFTI | | | | | | | |
| | FSGSGSGTDFT | | | | | | | | SRDNSKNTLYLQ | | | | | | | |
| | LTISRLEPEDF | | | | | | | | MNSLRAEDTAIY | | | | | | | |
| | AVYYCQQYGS | | | | | | | | YCARTGWLGPFD | | | | | | | |
| | SPWTFGQGTK | | | | | | | | YWGQGTLVTVSS | | | | | | | |
| | VEIK | | | | | | | | | | | | | | | |
| CD16 | DTVLTQSPASL | 249 | QSVD | 250 | TTS | 251 | QQS | 252 | QVTLKESGPGIL | 253 | GFSL | 254 | IWWD | 255 | AQIN | 256 |
| | AVSLGQRATIS | | FDGD | | | | NEDP | | QPSQTLSLTCSF | | RTSG | | DDK | | PAWF | |
| | CKASQSVDFD | | SF | | | | YT | | SGFSLRTSGMGV | | MG | | | | AY | |
| | GDSFMNWYQ | | | | | | | | GWIRQPSGKGLE | | | | | | | |
| | QKPGQPPKLLI | | | | | | | | WLAHIWWDDDKR | | | | | | | |
| | YTTSNLESGIP | | | | | | | | YNPALKSRLTIS | | | | | | | |
| | ARFSASGSGT | | | | | | | | KDTSSNQVFLKI | | | | | | | |
| | DFTLNIHPVEE | | | | | | | | ASVDTADTATYY | | | | | | | |
| | EDTATYYCQQ | | | | | | | | CAQINPAWFAYW | | | | | | | |
| | SNEDPYTFGG | | | | | | | | GQGTLVTVSA | | | | | | | |
| | GTKLEIK | | | | | | | | | | | | | | | |
| CD184 | DIQMTQSPSSL | 257 | QGIS | 258 | AAS | 259 | QQY | 260 | EVQLVESGGGLV | 261 | GFTF | 262 | ISSR | 263 | ARDY | 264 |
| (CXCR4) | SASVGDRVTIT | | SW | | | | NSYP | | QPGGSLRLSCAA | | SSYS | | SRTI | | GGQP | |
| | CRASQGISSW | | | | | | RT | | AGFTFSSYSMNW | | | | | | PYYY | |
| | LAWYQQKPE | | | | | | | | VRQAPGKGLEW | | | | | | YYGM | |
| | KAPKSLIYAAS | | | | | | | | VSYISSRSRTIY | | | | | | DV | |
| | SLQSGVPSRFS | | | | | | | | YADSVKGRFTIS | | | | | | | |
| | GSGSGTDFTLT | | | | | | | | RDNAKNSLYLQM | | | | | | | |
| | ISSLQPEDFVT | | | | | | | | NSLRDEDTAVYY | | | | | | | |
| | YYCQQYNSYP | | | | | | | | CARDYGGQPPYY | | | | | | | |
| | RTFGQGTKVEI | | | | | | | | YYYGMDVWGQ | | | | | | | |
| | K | | | | | | | | GTTVTVSS | | | | | | | |
| CD19 | DIQMTQTTSSL | 265 | QDISK | 266 | HTS | 267 | QQG | 268 | EVKLQESGPGLV | 269 | GVSL | 270 | IWGS | 271 | AKHY | 272 |
| | SASLGDRVTIS | | Y | | | | NTLP | | APSQSLSVTCTV | | PDY | | ETT | | YYGG | |
| | CRASQDISKYL | | | | | | YT | | SGVSLPDYGVSW | | G | | | | SYAM | |
| | NWYQQKPDG | | | | | | | | IRQPPRKGLEWL | | | | | | DY | |
| | TVKLLIYHTSR | | | | | | | | GVIWGSETTYYN | | | | | | | |
| | LHSGVPSRFSG | | | | | | | | SALKSRLTIIKD | | | | | | | |
| | SGSGTDYSLTI | | | | | | | | NSKSQVFLK | | | | | | | |
| | SNLEQE | | | | | | | | MNSLQTDDTAIY | | | | | | | |
| | DIATYFCQQG | | | | | | | | YCAKHYYYGGS | | | | | | | |
| | NTLPYTFGGG | | | | | | | | YAMDYWGQGTS | | | | | | | |
| | TKLEIK | | | | | | | | VTVSS | | | | | | | |
| CD19 | EIVLTQSPDFQ | 273 | ESVDT | 274 | EAS | 275 | QQS | 276 | EVQLVESGGGLV | 277 | GFTF | 278 | IYPG | 279 | ARSG | 280 |
| | SVTPKEKVTIT | | FGISF | | | | KEVP | | QPGGSLRLSCAA | | SSSW | | DGDT | | FITT | |
| | CRASESVDTF | | | | | | FT | | SGFTFSSSWMNW | | | | | | VRDF | |
| | GISFMNWFQQ | | | | | | | | VRQAPGKGLEW | | | | | | DY | |
| | KPDQSPKLLIH | | | | | | | | VGRIYPGDGDTN | | | | | | | |
| | EASNQGSGVP | | | | | | | | YNVKFKGRFTIS | | | | | | | |
| | SRFSGSGSGTD | | | | | | | | RDDSKNSLYLQM | | | | | | | |
| | FTLTINSLEAE | | | | | | | | NSLKTEDTAVYY | | | | | | | |
| | DAATYYCQQS | | | | | | | | CARSGFITTVRD | | | | | | | |
| | KEVPFTFGGG | | | | | | | | FDYWGQGTLVTV | | | | | | | |
| | TKVEIK | | | | | | | | SS | | | | | | | |
| CD19 | DIQMTQSPSSL | 281 | TDIS | 282 | YGS | 283 | GQG | 284 | QVQLQESGPGLV | 285 | GHSI | 286 | ISYS | 287 | ARSL | 288 |
| | SASVGDSVTIT | | SH | | | | NRLP | | KPSETLSLTCAV | | SHD | | GIT | | ARTT | |
| | CQASTDISSHL | | | | | | YT | | SGHSISHDHAWS | | HA | | | | AMDY | |
| | NWYQQKPGK | | | | | | | | WVRQPPGEGLEW | | | | | | | |
| | APELLIYYGSH | | | | | | | | IGFISYSGITNY | | | | | | | |
| | LLSGVPSRFSG | | | | | | | | NPSLQGRVTISR | | | | | | | |
| | SGSGTDFTFTI | | | | | | | | DNSKNTLYLQMN | | | | | | | |
| | SSLEAEDAAT | | | | | | | | SLRAEDTAVYYC | | | | | | | |
| | YYCGQGNRLP | | | | | | | | ARSLARTTAMDY | | | | | | | |
| | YTFGQGTKVE | | | | | | | | WGEGTLVTVSS | | | | | | | |
| | IE | | | | | | | | | | | | | | | |
| CD19 | EIVLTQSPATL | 289 | SSVS | 290 | DTS | 291 | FQGS | 292 | QVQLQESGPGLV | 293 | GGSI | 294 | IWWD | 295 | ARME | 296 |
| | SLSPGERATLS | | Y | | | | VYPF | | KPSQTLSLTCTV | | STSG | | DDK | | LWSY | |
| | CSASSSVSYM | | | | | | T | | SGGSISTSGMGV | | MG | | | | YFDY | |
| | HWYQQKPGQ | | | | | | | | GWIRQHPGKGLE | | | | | | | |
| | APRLLIYDTSK | | | | | | | | WIGHIWWDDDK | | | | | | | |
| | LASGIPARFSG | | | | | | | | RYNPALKSRVTI | | | | | | | |
| | SGSGTDFTLTI | | | | | | | | SVDTSKNQFSLK | | | | | | | |
| | SSLEPEDVAV | | | | | | | | LSSVTAADTAVY | | | | | | | |
| | YYCFQGSVYP | | | | | | | | YCARMELWSYYF | | | | | | | |
| | FTFGQGTKLEI | | | | | | | | DYWGQGTLVTV | | | | | | | |
| | K | | | | | | | | SS | | | | | | | |
| CD19 | DIQLTQSPASL | 297 | QSVD | 298 | DAS | 299 | QQST | 300 | QVQLQQSGAELV | 301 | GYA | 302 | IWPG | 303 | ARRE | 304 |
| | AVSLGQRATIS | | YDGD | | | | EDP | | RPGSSVKISCKA | | FSSY | | DGDT | | TTTV | |
| | CKASQSVDYD | | SY | | | | WT | | SGYAFSSYWMNW | | W | | | | GRYY | |
| | GDSYLNWYQ | | | | | | | | VKQRPGQGLEWI | | | | | | YAMD | |
| | QIPGQPPKLLI | | | | | | | | GQIWPGDGDTNY | | | | | | Y | |
| | YDASNLVSGIP | | | | | | | | NGKFKGKATLTA | | | | | | | |
| | PRFSGSGSGTD | | | | | | | | DESSSTAYMQLS | | | | | | | |
| | FTLNIHPVEKV | | | | | | | | SLASEDSAVYFC | | | | | | | |
| | DAATYHCQQS | | | | | | | | ARRETTTVGRYY | | | | | | | |
| | TEDPWTFGGG | | | | | | | | YAMDYWGQGTT | | | | | | | |
| | TKLEIK | | | | | | | | VTVSS | | | | | | | |
| CD19 | DIVMTQAAPSI | 305 | KSLL | 306 | RMS | 307 | MQH | 308 | QVQLQQSGPELI | 309 | GYTF | 310 | INPY | 311 | ARGT | 312 |
| | PVTPGESVSIS | | NSNG | | | | LEYP | | KPGASVKMSCK | | TSYV | | NDGT | | YYYG | |
| | CRSSKSLLNSN | | NTY | | | | LT | | ASGYTFTSYVMH | | | | | | SRVF | |
| | GNTYLYWFLQ | | | | | | | | WVKQKPGQGLE | | | | | | DY | |
| | RPGQSPQLLIY | | | | | | | | QIGYINPYNDGT | | | | | | | |
| | RMSNLASGVP | | | | | | | | KYNEKFKGKATL | | | | | | | |
| | DRFSGSGSGT | | | | | | | | TSDKSSTAYMEL | | | | | | | |
| | AFTLRISRVEA | | | | | | | | SSLTSEDSAVYY | | | | | | | |
| | EDVGVYYCM | | | | | | | | CARGTYYYGSRV | | | | | | | |
| | QHLEYPLTFG | | | | | | | | FDYWGQGTTLT | | | | | | | |
| | AGTKLEIK | | | | | | | | VTVSS | | | | | | | |
| CD19 | EIVLTQSPAIM | 313 | SGVN | 314 | DTS | 315 | HQR | 316 | QVQLVQPGAEV | 317 | GYTF | 318 | IDPS | 319 | ARGS | 320 |
| | SASPGERVTM | | Y | | | | GSYT | | VKPGASVKLSCK | | TSN | | DSYT | | NPYY | |
| | TCSASSGVNY | | | | | | | | TSGYTFTSNWMH | | W | | | | YAMD | |
| | MHWYQQKPG | | | | | | | | WVKQAPGQGLE | | | | | | Y | |
| | TSPRRWIYDTS | | | | | | | | WIGEIDPSDSYT | | | | | | | |
| | KLASGVPARF | | | | | | | | NYNQNFQGKAKL | | | | | | | |
| | SGSGSGTDYS | | | | | | | | TVDKSTSTAYME | | | | | | | |
| | LTISSMEPEDA | | | | | | | | VSSLRSDDTAVY | | | | | | | |
| | ATYYCHQRGS | | | | | | | | YCARGSNPYYYA | | | | | | | |
| | YTFGGGTKLEI | | | | | | | | MDYWGQGTSVT | | | | | | | |
| | K | | | | | | | | VSS | | | | | | | |
| CD192 | DVVMTQSPLS | 321 | QSLL | 322 | LVS | 323 | WQG | 324 | EVQLVESGGGLV | 325 | GFTF | 326 | IRTK | 327 | TTFY | 328 |
| (CCR2) | LPVTLGQPASI | | DSDG | | | | THFP | | KPGGSLRLSCAA | | SAY | | NNNY | | GNGV | |
| | SCKSSQSLLDS | | KTF | | | | YT | | SGFTFSAYAMN | | A | | AT | | W | |
| | DGKTFLNWFQ | | | | | | | | WVRQAPGKGLE | | | | | | | |
| | QRPGQSPRRLI | | | | | | | | WVGRIRTKNNN | | | | | | | |
| | YLVSKLDSGV | | | | | | | | YATYYADSVKD | | | | | | | |
| | PDRFSGSGSGT | | | | | | | | RFTISRDDSKNT | | | | | | | |
| | DFTLKISRVEA | | | | | | | | LYLQMNSLKTED | | | | | | | |
| | EDVGVYYCW | | | | | | | | TAVYYCTTFYGN | | | | | | | |
| | QGTHFPYTFG | | | | | | | | GVWGQGTLVTVS | | | | | | | |
| | QGTRLEIK | | | | | | | | S | | | | | | | |
| CD194 | DVLMTQSPLS | 329 | RNIV | 330 | KVS | 331 | FQGS | 332 | EVQLVESGGDLV | 333 | GFIF | 334 | ISSA | 335 | GRHS | 336 |
| (CCR4) | LPVTPGEPASI | | HING | | | | LLP | | QPGRSLRLSCAA | | SNY | | STYS | | DGNF | |
| | SCRSSRNIVHI | | DTY | | | | WT | | SGFIFSNYGMSW | | G | | | | AFGY | |
| | NGDTYLEWYL | | | | | | | | VRQAPGKGLEW | | | | | | | |
| | QKPGQSPQLLI | | | | | | | | VATISSASTYSYY | | | | | | | |
| | YKVSNRFSGV | | | | | | | | PDSVKGRFTISRD | | | | | | | |
| | PDRFSGSGSGT | | | | | | | | NAKNSLYLQMN | | | | | | | |
| | DFTLKISRVEA | | | | | | | | SLRVEDTALYYC | | | | | | | |
| | EDVGVYYCFQ | | | | | | | | GRHSDGNFAFGY | | | | | | | |
| | GSLLPWTFGQ | | | | | | | | WGQGTLVTVSS | | | | | | | |
| | GTKVEIK | | | | | | | | | | | | | | | |
| CD195 | DIVMTQSPLSL | 337 | QRLL | 338 | EVS | 339 | SQST | 340 | EVQLVESGGGLV | 341 | GYTF | 342 | IYPG | 343 | GSSF | 344 |
| (CCR5) | PVTPGEPASIS | | SSYG | | | | HVPL | | KPGGSLRLSCAA | | SNY | | GNYI | | GSN | |
| | CRSSQRLLSSY | | HTY | | | | T | | SGYTFSNYWIGW | | W | | | | YVFA | |
| | GHTYLHWYL | | | | | | | | VRQAPGKGLEWI | | | | | | WFTY | |
| | QKPGQSPQLLI | | | | | | | | GDIYPGGNYIRN | | | | | | W | |
| | YEVSNRFSGV | | | | | | | | NEKFKDKTTLSA | | | | | | | |
| | PDRFSGSGSGT | | | | | | | | DTSKNTAYLQM | | | | | | | |
| | DFTLKISRVEA | | | | | | | | NSLKTEDTAVYY | | | | | | | |
| | EDVGVYYCSQ | | | | | | | | CGSSFGSNYVFA | | | | | | | |
| | STHVPLTFGQ | | | | | | | | WFTYWGQGTLV | | | | | | | |
| | GTKVEIK | | | | | | | | TVSS | | | | | | | |
| CD20 | EIVLTQSPATL | 345 | QSVS | 346 | DAS | 347 | QQRS | 348 | EVQLVESGGGLV | 349 | GFTF | 350 | ISWN | 351 | AKDI | 352 |
| | SLSPGERATLS | | SY | | | | NWPI | | QPGRSLRLSCAA | | NDY | | SGSI | | QYGN | |
| | CRASQSVSSY | | | | | | T | | SGFTFNDYAMH | | A | | | | YYYG | |
| | LAWYQQKPG | | | | | | | | WVRQAPGKGLE | | | | | | MDV | |
| | QAPRLLIYDAS | | | | | | | | WVSTISWNSGSI | | | | | | | |
| | NRATGIPARFS | | | | | | | | GYADSVKGRFTI | | | | | | | |
| | GSGSGTDFTLT | | | | | | | | SRDNAKKSLYLQ | | | | | | | |
| | ISSLEPEDFAV | | | | | | | | MNSLRAEDTALY | | | | | | | |
| | YYCQQRSNWP | | | | | | | | YCAKDIQYGNYY | | | | | | | |
| | ITFGQGTRLEI | | | | | | | | YGMDVWGQGTT | | | | | | | |
| | K | | | | | | | | VTVSS | | | | | | | |
| CD20 | QIVLSQSPAILS | 353 | SSVS | 354 | APS | 355 | QQW | 356 | QAYLQQSGAELV | 357 | GYTF | 358 | IYPG | 359 | ARVV | 360 |
| | ASPGEKVTMT | | Y | | | | SFNP | | RPGASVKMSCKA | | TSYN | | NGDT | | YYSN | |
| | CRASSSVSYM | | | | | | PT | | SGYTFTSYNMH | | | | | | SYWY | |
| | HWYQQKPGSS | | | | | | | | WVKQTPRQGLE | | | | | | FDV | |
| | PKPWIYAPSNL | | | | | | | | WIGAIYPGNGDT | | | | | | | |
| | ASGVPARFSG | | | | | | | | SYNQKFKGKATL | | | | | | | |
| | SGSGTSYSLTI | | | | | | | | TVDKSSSTAYMQ | | | | | | | |
| | SRVEAEDAAT | | | | | | | | LSSLTSEDSAVYF | | | | | | | |
| | YYCQQWSFNP | | | | | | | | CARVVYYSNSY | | | | | | | |
| | PTFGAGTKLE | | | | | | | | WYFDVWGTGTT | | | | | | | |
| | LK | | | | | | | | VTVSGPSVFPLAP | | | | | | | |
| | | | | | | | | | SS | | | | | | | |
| CD20 | QIVLSQSPAILS | 361 | SSVS | 362 | ATS | 363 | QQW | 364 | QAYLQQSGAELV | 365 | GYTF | 366 | IYPG | 367 | ARYD | 368 |
| | ASPGEKVTMT | | Y | | | | TFNP | | RPGASVKMSCKA | | TSYN | | NGDT | | YNYA | |
| | CRASSSVSYM | | | | | | PT | | SGYTFTSYNMH | | | | | | MDY | |
| | HWYQQKPGSS | | | | | | | | WVKQTPRQGLE | | | | | | | |
| | PKPWIYATSN | | | | | | | | WIGGIYPGNGDT | | | | | | | |
| | LASGVPARFS | | | | | | | | SYNQKFKGKATL | | | | | | | |
| | GSGSGTSYSFT | | | | | | | | TVGKSSSTAYMQ | | | | | | | |
| | ISRVEAEDAAT | | | | | | | | LSSLTSEDSAVYF | | | | | | | |
| | YYCQQWTFNP | | | | | | | | CARYDYNYAMD | | | | | | | |
| | PTFGGGTRLEI | | | | | | | | YWGQGTSVTVSS | | | | | | | |
| | K | | | | | | | | | | | | | | | |
| CD20 | QIVLSQSPAILS | 369 | SSVS | 370 | ATS | 371 | QQW | 372 | QVQLQQPGAELV | 373 | GYTF | 374 | IYPG | 375 | ARST | 376 |
| | ASPGEKVTMT | | Y | | | | TSNP | | KPGASVKMSCK | | TSYN | | NGDT | | YYGG | |
| | CRASSSVSYIH | | | | | | PT | | ASGYTFTSYNMH | | | | | | DWYF | |
| | WFQQKPGSSP | | | | | | | | WVKQTPGRGLE | | | | | | NV | |
| | KPWIYATSNL | | | | | | | | WIGAIYPGNGDT | | | | | | | |
| | ASGVPVRFSG | | | | | | | | SYNQKFKGKATL | | | | | | | |
| | SGSGTSYSLTI | | | | | | | | TADKSSSTAYMQ | | | | | | | |
| | SRVEAEDAAT | | | | | | | | LSSLTSEDSAVY | | | | | | | |
| | YYCQQWTSNP | | | | | | | | YCARSTYYGGD | | | | | | | |
| | PTFGGGTKLEI | | | | | | | | WYFNVWGAGTT | | | | | | | |
| | K | | | | | | | | VTVSA | | | | | | | |
| CD20 | DIQLTQSPSSL | 377 | SSVS | 378 | ATS | 379 | QQW | 380 | QVQLQQSGAEV | 381 | GYTF | 382 | IYPG | 383 | ARST | 384 |
| | SASVGDRVTM | | Y | | | | TSNP | | KKPGSSVKVSCK | | TSYN | | NGDT | | YYGG | |
| | TCRASSSVSYI | | | | | | PT | | ASGYTFTSYNMH | | | | | | DWYF | |
| | HWFQQKPGK | | | | | | | | WVKQAPGQGLE | | | | | | DV | |
| | APKPWIYATS | | | | | | | | WIGAIYPGNGDT | | | | | | | |
| | NLASGVPVRF | | | | | | | | SYNQKFKGKATL | | | | | | | |
| | SGSGSGTDYT | | | | | | | | TADESTNTAYME | | | | | | | |
| | FTISSLQPEDIA | | | | | | | | LSSLRSEDTAFYY | | | | | | | |
| | TYYCQQWTSN | | | | | | | | CARSTYYGGDW | | | | | | | |
| | PPTFGGGTKLE | | | | | | | | YFDVWGQGTTV | | | | | | | |
| | IK | | | | | | | | TVSS | | | | | | | |
| CD20 | DIVMTQTPLSL | 385 | KSLL | 386 | QMS | 387 | AQN | 388 | QVQLVQSGAEV | 389 | GYA | 390 | IFPG | 391 | ARNV | 392 |
| | PVTPGEPASIS | | HSNG | | | | LELP | | KKPGSSVKVSCK | | FSYS | | DGDT | | FDGY | |
| | CRSSKSLLHSN | | ITY | | | | YT | | ASGYAFSYSWIN | | W | | | | WLVY | |
| | GITYLYWYLQ | | | | | | | | WVRQAPGQGLE | | | | | | | |
| | KPGQSPQLLIY | | | | | | | | WMGRIFPGDGDT | | | | | | | |
| | QMSNLVSGVP | | | | | | | | DYNGKFKGRVTI | | | | | | | |
| | DRFSGSGSGT | | | | | | | | TADKSTSTAYME | | | | | | | |
| | DFTLKISRVEA | | | | | | | | LSSLRSEDTAVY | | | | | | | |
| | EDVGVYYCA | | | | | | | | YCARNVFDGYW | | | | | | | |
| | QNLELPYTFG | | | | | | | | LVYWGQGTLVT | | | | | | | |
| | GGTKVEIK | | | | | | | | VSS | | | | | | | |
| CD200 | DIQMTQSPSSL | 393 | QDIN | 394 | RAN | 395 | LQY | 396 | QVQLQQSGSELK | 397 | GYSF | 398 | IDPY | 399 | GRSK | 400 |
| | SASIGDRVTIT | | SY | | | | DEFP | | KPGASVKISCKA | | TDYI | | YGSS | | RDYF | |
| | CKASQDINSY | | | | | | YT | | SGYSFTDYIILWV | | | | | | DYW | |
| | LSWFQQKPGK | | | | | | | | RQNPGKGLEWIG | | | | | | | |
| | APKLLIYRAN | | | | | | | | HIDPYYGSSNYN | | | | | | | |
| | RLVDGVPSRF | | | | | | | | LKFKGRVTITAD | | | | | | | |
| | SGSGSGTDYT | | | | | | | | QSTTTAYMELSS | | | | | | | |
| | LTISSLQPEDF | | | | | | | | LRSEDTAVYYCG | | | | | | | |
| | AVYYCLQYDE | | | | | | | | RSKRDYFDYWG | | | | | | | |
| | FPYTFGGGTK | | | | | | | | QGTTLTVSS | | | | | | | |
| | LEIK | | | | | | | | | | | | | | | |
| CD22 | DIQLTQSPSSL | 401 | QSVL | 402 | WAS | 403 | HQY | 404 | QVQLQESGAELS | 405 | GYTF | 406 | INPR | 407 | ARRD | 408 |
| | AVSAGENVTM | | YSAN | | | | LSSW | | KPGASVKMSCK | | TSY | | NDYT | | ITTF | |
| | SCKSSQSVLYS | | HKNY | | | | T | | ASGYTFTSYWLH | | W | | | | Y | |
| | ANHKNYLAW | | | | | | | | WIKQRPGQGLE | | | | | | | |
| | YQQKPGQSPK | | | | | | | | WIGYINPRNDYT | | | | | | | |
| | LLIYWASTRES | | | | | | | | EYNQNFKDKATL | | | | | | | |
| | GVPDRFTGSG | | | | | | | | TADKSSSTAYMQ | | | | | | | |
| | SGTDFTLTISR | | | | | | | | LSSLTSEDSAVY | | | | | | | |
| | VQVEDLAIYY | | | | | | | | YCARRDITTFYW | | | | | | | |
| | CHQYLSSWTF | | | | | | | | GQGTTLTVSS | | | | | | | |
| | GGGTKLEIK | | | | | | | | | | | | | | | |
| CD221 | DIQMTQFPSSL | 409 | QGIR | 410 | AAS | 411 | LQH | 412 | EVQLLESGGGLV | 413 | GFTF | 414 | ISGS | 415 | AKDL | 416 |
| (IGF1R) | SASVGDRVTIT | | ND | | | | NSYP | | QPGGSLRLSCTA | | SSYA | | GGTT | | GWSD | |
| | CRASQGIRND | | | | | | CS | | SGFTFSSYAMNW | | | | | | SYYY | |
| | LGWYQQKPG | | | | | | | | VRQAPGKGLEW | | | | | | YYGM | |
| | KAPKRLIYAA | | | | | | | | VSAISGSGGTTFY | | | | | | DV | |
| | SRLHRGVPSRF | | | | | | | | ADSVKGRFTISR | | | | | | | |
| | SGSGSGTEFTL | | | | | | | | DNSRTTLYLQMN | | | | | | | |
| | TISSLQPEDFA | | | | | | | | SLRAEDTAVYYC | | | | | | | |
| | TYYCLQHNSY | | | | | | | | AKDLGWSDSYY | | | | | | | |
| | PCSFGQGTKL | | | | | | | | YYYGMDVWGQ | | | | | | | |
| | EIK | | | | | | | | GTTVTVSS | | | | | | | |
| CD221 | DIQMTQSPSSL | 417 | QGIS | 418 | AKS | 419 | QQY | 420 | EVQLLQSGGGLV | 421 | GFM | 422 | ISGS | 423 | AKDF | 424 |
| (IGF1R) | SASLGDRVTIT | | SY | | | | WTFP | | QPGGSLRLSCAA | | FSRY | | GGAT | | YQIL | |
| | CRASQGISSYL | | | | | | LT | | SGFMFSRYPMH | | P | | | | TGNA | |
| | AWYQQKPGK | | | | | | | | WVRQAPGKGLE | | | | | | FDY | |
| | APKLLIYAKST | | | | | | | | WVGSISGSGGAT | | | | | | | |
| | LQSGVPSRFSG | | | | | | | | PYADSVKGRFTIS | | | | | | | |
| | SGSGTDFTLTI | | | | | | | | RDNSKNTLYLQ | | | | | | | |
| | SSLQPEDSATY | | | | | | | | MNSLRAEDTAV | | | | | | | |
| | YCQQYWTFPL | | | | | | | | YYCAKDFYQILT | | | | | | | |
| | TFGGGTKVEI | | | | | | | | GNAFDYWGQGT | | | | | | | |
| | K | | | | | | | | TVTVSS | | | | | | | |
| CD221 | QIVLTQSPAIM | 425 | SSVS | 426 | GTS | 427 | QQRS | 428 | EVQLQQSGPELV | 429 | GYSF | 430 | RINP | 431 | CAKS | 432 |
| (IGF1R) | SASPGEKVTIT | | Y | | | | SYPF | | KPGSSVKISCKAS | | TAY | | D | | TSYD | |
| | CSASSSVSYIH | | | | | | T | | GYSFTAYYMHW | | Y | | NGG | | YDGY | |
| | WFQQKPGTSP | | | | | | | | VKQSHGKSLEQI | | | | | | WFDV | |
| | KVWIYGTSNL | | | | | | | | SGRINPDNGGNS | | | | | | | |
| | ASGVPARFTG | | | | | | | | YNQFKFGKAILT | | | | | | | |
| | SGSGTSYSLTI | | | | | | | | VDKSSNTAYMEL | | | | | | | |
| | SRMEAEDAAT | | | | | | | | RSLTSEDSAVYY | | | | | | | |
| | YYCQQRSSYP | | | | | | | | CAKSTSYDYDGY | | | | | | | |
| | FTFGSGTKLEI | | | | | | | | WFDVWGAGTTV | | | | | | | |
| | K | | | | | | | | TVSS | | | | | | | |
| CD221 | SSELTQDPAVS | 433 | SLRS | 434 | GEN | 435 | KSRD | 436 | EVQLVQSGAEVK | 437 | GGTF | 438 | IIPI | 439 | ARAP | 440 |
| (IGF1R) | VALGQTVRIT | | YY | | | | GSG | | KPGSSVKVSCKA | | SSYA | | FGTA | | LRFL | |
| | CQGDSLRSYY | | | | | | QHL | | SGGTFSSYAISW | | | | | | EWST | |
| | ATWYQQKPG | | | | | | V | | VRQAPGQGLEW | | | | | | QDHY | |
| | QAPILVIYGEN | | | | | | | | MGGIIPIFGTANY | | | | | | YYYY | |
| | KRPSGIPDRFS | | | | | | | | AQKFQGRVTITA | | | | | | MDV | |
| | GSSSGNTASLT | | | | | | | | DKSTSTAYMELS | | | | | | | |
| | ITGAQAEDEA | | | | | | | | SLRSEDTAVYYC | | | | | | | |
| | DYYCKSRDGS | | | | | | | | ARAPLRFLEWST | | | | | | | |
| | GQHLVFGGGT | | | | | | | | QDHYYYYYMDV | | | | | | | |
| | KLTVL | | | | | | | | WGKGTTVTVSS | | | | | | | |
| CD221 | EIVLTQSPGTL | 441 | QSIG | 442 | YAS | 443 | HQSS | 444 | EVQLVQSGGGLV | 445 | GFTF | 446 | IDTR | 447 | ARLG | 448 |
| (IGF1R) | SVSPGERATLS | | SS | | | | RLPH | | KPGGSLRLSCAA | | SSFA | | GAT | | NFYY | |
| | CRASQSIGSSL | | | | | | T | | SGFTFSSFAMHW | | | | | | GMDV | |
| | HWYQQKPGQ | | | | | | | | VRQAPGKGLEWI | | | | | | | |
| | APRLLIKYASQ | | | | | | | | SVIDTRGATYYA | | | | | | | |
| | SLSGIPDRFSG | | | | | | | | DSVKGRFTISRD | | | | | | | |
| | SGSGTDFTLTI | | | | | | | | NAKNSLYLQMN | | | | | | | |
| | SRLEPEDFAV | | | | | | | | SLRAEDTAVYYC | | | | | | | |
| | YYCHQSSRLP | | | | | | | | ARLGNFYYGMD | | | | | | | |
| | HTFGQGTKVE | | | | | | | | VWGQGTTVTVSS | | | | | | | |
| | IK | | | | | | | | | | | | | | | |
| CD221 | EIVLTQSPATL | 449 | QSVS | 450 | DAS | 451 | QQRS | 452 | QVELVESGGGVV | 453 | GFTF | 454 | IWFD | 455 | AREL | 456 |
| (IGF1R) | SLSPGERATLS | | SY | | | | KWP | | QPGRSQRLSCAA | | SSYG | | GSST | | GRRY | |
| | CRASQSVSSY | | | | | | PWT | | SGFTFSSYGMHW | | | | | | FDL | |
| | LAWYQQKPG | | | | | | | | VRQAPGKGLEW | | | | | | | |
| | QAPRLLIYDAS | | | | | | | | VAIIWFDGSSTYY | | | | | | | |
| | KRATGIPARFS | | | | | | | | ADSVRGRFTISRD | | | | | | | |
| | GSGSGTDFTLT | | | | | | | | NSKNTLYLQMNS | | | | | | | |
| | ISSLEPEDFAV | | | | | | | | LRAEDTAVYFCA | | | | | | | |
| | YYCQQRSKWP | | | | | | | | RELGRRYFDLWG | | | | | | | |
| | PWTFGQGTKV | | | | | | | | RGTLVSVSS | | | | | | | |
| | ESK | | | | | | | | | | | | | | | |
| CD221 | DIVMTQSPLSL | 457 | QSIV | 458 | KVS | 459 | FQGS | 460 | QVQLQESGPGLV | 461 | GYSI | 462 | ISYD | 463 | ARYG | 464 |
| (IGF1R) | PVTPGEPASIS | | HSNG | | | | HVP | | KPSETLSLTCTVS | | TGG | | GTN | | RVFF | |
| | CRSSQSIVHSN | | NTY | | | | WT | | GYSITGGYLWN | | YL | | | | DY | |
| | GNTYLQWYL | | | | | | | | WIRQPPGKGLEW | | | | | | | |
| | QKPGQSPQLLI | | | | | | | | IGYISYDGTNNY | | | | | | | |
| | YKVSNRLYGV | | | | | | | | KPSLKDRVTISRD | | | | | | | |
| | PDRFSGSGSGT | | | | | | | | TSKNQFSLKLSSV | | | | | | | |
| | DFTLKISRVEA | | | | | | | | TAADTAVYYCA | | | | | | | |
| | EDVGVYYCFQ | | | | | | | | RYGRVFFDYWG | | | | | | | |
| | GSHVPWTFGQ | | | | | | | | QGTLVTVSS | | | | | | | |
| | GTKVEIK | | | | | | | | | | | | | | | |
| CD221 | DVVMTQSPLS | 465 | QSLL | 466 | LGS | 467 | MQG | 468 | QVQLQESGPGLV | 469 | GGSI | 470 | IYHS | 471 | ARWT | 472 |
| (IGF1R) | LPVTPGEPASI | | HSNG | | | | THW | | KPSGTLSLTCAVS | | SSSN | | GST | | GRTD | |
| | SCRSSQSLLHS | | YNY | | | | PLT | | GGSISSSNWWSW | | W | | | | AFDI | |
| | NGYNYLDWY | | | | | | | | VRQPPGKGLEWI | | | | | | | |
| | LQKPGQSPQL | | | | | | | | GEIYHSGSTNYN | | | | | | | |
| | LIYLGSNRASG | | | | | | | | PSLKSRVTISVDK | | | | | | | |
| | VPDRFSGSGS | | | | | | | | SKNQFSLKLSSVT | | | | | | | |
| | GTDFTLKISRV | | | | | | | | AADTAVYYCAR | | | | | | | |
| | EAEDVGVYYC | | | | | | | | WTGRTDAFDIW | | | | | | | |
| | MQGTHWPLTF | | | | | | | | GQGTMVTVSS | | | | | | | |
| | GQGTKVEIK | | | | | | | | | | | | | | | |
| CD223 | EIVLTQSPATL | 473 | QSIS | 474 | DAS | 475 | QQRS | 476 | QVQLQQWGAGL | 477 | GGSF | 478 | INHR | 479 | AFGY | 480 |
| (L4G-3) | SLSPGERATLS | | SY | | | | NWP | | LKPSETLSLTCAV | | SDY | | GST | | SDYE | |
| | CRASQSISSYL | | | | | | LT | | YGGSFSDYYWN | | Y | | | | YNWF | |
| | AWYQQKPGQ | | | | | | | | WIRQPPGKGLEW | | | | | | DP | |
| | APRLLIYDASN | | | | | | | | IGEINHRGSTNSN | | | | | | | |
| | RATGIPARFSG | | | | | | | | PSLKSRVTLSLDT | | | | | | | |
| | SGSGTDFTLTI | | | | | | | | SKNQFSLKLRSV | | | | | | | |
| | SSLEPEDFAVY | | | | | | | | TAADTAVYYCAF | | | | | | | |
| | YCQQRSNWPL | | | | | | | | GYSDYEYNWFD | | | | | | | |
| | TFGQGTNLEIK | | | | | | | | PWGQGTLVTVSS | | | | | | | |
| CD248 | DIQMTQSPSSL | 481 | QNVG | 482 | SAS | 483 | QQY | 484 | QVQLQESGPGLV | 485 | GYTF | 486 | INPY | 487 | ARRG | 488 |
| | SASVGDRVTIT | | TA | | | | TNYP | | RPSQTLSLTCTAS | | TDY | | DDDT | | NSYD | |
| | CRASQNVGTA | | | | | | MYT | | GYTFTDYVIHWV | | V | | | | GYFD | |
| | VAWLQQTPG | | | | | | | | KQPPGRGLEWIG | | | | | | YSMD | |
| | KAPKLLIYSAS | | | | | | | | YINPYDDDTTYN | | | | | | Y | |
| | NRYTGVPSRF | | | | | | | | QKFKGRVTMLV | | | | | | | |
| | SGSGSGTDYT | | | | | | | | DTSSNTAYLRLSS | | | | | | | |
| | FTISSLQPEDIA | | | | | | | | VTAEDTAVYYC | | | | | | | |
| | TYYCQQYTNY | | | | | | | | ARRGNSYDGYFD | | | | | | | |
| | PMYTFGQGTK | | | | | | | | YSMDYWGSGTP | | | | | | | |
| | VQIK | | | | | | | | VTVSS | | | | | | | |
| CD25 | QIVSTQSPAIM | 489 | SSRS | 490 | DTS | 491 | HQRS | 492 | QLQQSGTVLARP | 493 | GYSF | 494 | IYPG | 495 | SRDY | 496 |
| | SASPGEKVTM | | Y | | | | SYT | | GASVKMSCKAS | | TRY | | NSDT | | GYYF | |
| | TCSASSSRSY | | | | | | | | GYSFTRYWMHW | | W | | | | DF | |
| | MQWYQQKPG | | | | | | | | IKQRPGQGLEWI | | | | | | | |
| | TSPKRWIYDTS | | | | | | | | GAIYPGNSDTSY | | | | | | | |
| | KLASGVPARF | | | | | | | | NQKFEGKAKLTA | | | | | | | |
| | SGSGSGTSYSL | | | | | | | | VTSASTAYMELS | | | | | | | |
| | TISSMEAEDA | | | | | | | | SLTHEDSAVYYC | | | | | | | |
| | ATYYCHQRSS | | | | | | | | SRDYGYYFDFW | | | | | | | |
| | YTFGGGTKLEI | | | | | | | | GQGTTLTVSS | | | | | | | |
| | K | | | | | | | | | | | | | | | |
| CD25 | DIQMTQSPSTL | 497 | SSIS | 498 | TTS | 499 | HQRS | 500 | QVQLVQSGAEV | 501 | GYTF | 502 | INPS | 503 | ARGG | 504 |
| | SASVGDRVTIT | | Y | | | | TYPL | | KKPGSSVKVSCK | | TSYR | | TGYT | | GVFD | |
| | CSASSSISYMH | | | | | | T | | ASGYTFTSYRMH | | | | | | YW | |
| | WYQQKPGKA | | | | | | | | WVRQAPGQGLE | | | | | | | |
| | PKLLIYTTSNL | | | | | | | | WIGYINPSTGYTE | | | | | | | |
| | ASGVPARFSG | | | | | | | | YNQKFKDKATIT | | | | | | | |
| | SGSGTEFTLTI | | | | | | | | ADESTNTAYMEL | | | | | | | |
| | SSLQPDDFAT | | | | | | | | SSLRSEDTAVYY | | | | | | | |
| | YYCHQRSTYP | | | | | | | | CARGGGVFDYW | | | | | | | |
| | LTFGQGTKVE | | | | | | | | GQGTLVTVSS | | | | | | | |
| | VK | | | | | | | | | | | | | | | |
| CD252 | DIQMTQSPSSL | 505 | QDIS | 506 | YTS | 507 | QQG | 508 | QVQLQESGPGLV | 509 | GGSF | 510 | ISYN | 511 | ARYK | 512 |
| (OX40L) | SASVGDRVTIT | | NY | | | | SALP | | KPSQTLSLTCAV | | SSGY | | GIT | | YDYD | |
| | CRASQDISNYL | | | | | | WT | | YGGSFSSGYWN | | | | | | GGHA | |
| | NWYQQKPGK | | | | | | | | WIRKHPGKGLEY | | | | | | MDY | |
| | APKLLIYYTSK | | | | | | | | IGYISYNGITYHN | | | | | | | |
| | LHSGVPSRFSG | | | | | | | | PSLKSRITINRDTS | | | | | | | |
| | SGSGTDYTLTI | | | | | | | | KNQYSLQLNSVT | | | | | | | |
| | SSLQPEDFATY | | | | | | | | PEDTAVYYCARY | | | | | | | |
| | YCQQGSALPW | | | | | | | | KYDYDGGHAMD | | | | | | | |
| | TFGQGTKVEI | | | | | | | | YWGQGTLVTVSS | | | | | | | |
| | K | | | | | | | | | | | | | | | |
| CD254 | EIVLTQSPGTL | 513 | QSVR | 514 | GAS | 515 | QQY | 516 | EVQLLESGGGLV | 517 | GFTF | 518 | ITGS | 519 | AKDP | 520 |
| (RANKL) | SLSPGERATLS | | GRY | | | | GSSP | | QPGGSLRLSCAA | | SSYA | | GGST | | GTTV | |
| | CRASQSVRGR | | | | | | RT | | SGFTFSSYAMSW | | | | | | IMSW | |
| | YLAWYQQKP | | | | | | | | VRQAPGKGLEW | | | | | | FDP | |
| | GQAPRLLIYG | | | | | | | | VSGITGSGGSTY | | | | | | | |
| | ASSRATGIPDR | | | | | | | | YADSVKGRFTIS | | | | | | | |
| | FSGSGSGTDFT | | | | | | | | RDNSKNTLYLQ | | | | | | | |
| | LTISRLEPEDF | | | | | | | | MNSLRAEDTAV | | | | | | | |
| | AVFYCQQYGS | | | | | | | | YYCAKDPGTTVI | | | | | | | |
| | SPRTFGQGTK | | | | | | | | MSWFDPWGQGT | | | | | | | |
| | VEIK | | | | | | | | LVTVSS | | | | | | | |
| CD257 | EIVLTQSPATL | 521 | QSVS | 522 | DAS | 523 | QQRS | 524 | QVQLQQWGAGL | 525 | GGSF | 526 | INHS | 527 | ARGY | 528 |
| (BAFF) | SLSPGERATLS | | RY | | | | NWP | | LKPSETLSLTCAV | | SGY | | GST | | YDIL | |
| | CRASQSVSRY | | | | | | RT | | YGGSFSGYYWS | | Y | | | | TGYY | |
| | LAWYQQKPG | | | | | | | | WIRQPPGKGLEW | | | | | | YYFD | |
| | QAPRLLIYDAS | | | | | | | | IGEINHSGSTNYN | | | | | | Y | |
| | NRATGIPARFS | | | | | | | | PSLKSRVTISVDT | | | | | | | |
| | GSGSGTDSTLT | | | | | | | | SKNQFSLKLSSVT | | | | | | | |
| | ISSLEPEDFAV | | | | | | | | AADTAVYYCAR | | | | | | | |
| | YYCQQRSNWP | | | | | | | | GYYDILTGYYYY | | | | | | | |
| | RTFGQGTKVEI | | | | | | | | FDYWGQGTLVT | | | | | | | |
| | K | | | | | | | | VSS | | | | | | | |
| CD257 | SSELTQDPAVS | 529 | SLRS | 530 | GKN | 531 | SSRD | 532 | QVQLQQSGAEV | 533 | GGTF | 534 | IIPM | 535 | ARSR | 536 |
| (BAFF) | VALGQTVRVT | | YY | | | | SSGN | | KKPGSSVRVSCK | | NNN | | FGTA | | DLLL | |
| | CQGDSLRSYY | | | | | | HWV | | ASGGTFNNNAIN | | A | | | | FPHH | |
| | ASQYQQKPGQ | | | | | | | | WVRQAPGQGLE | | | | | | ALSP | |
| | APVLVIYGKN | | | | | | | | WMGGIIPMFGTA | | | | | | | |
| | NRPSGIPDRFS | | | | | | | | KYSQNFQGRVAI | | | | | | | |
| | GSSSGNTASLT | | | | | | | | TADESTGTASME | | | | | | | |
| | ITGAQAEDEA | | | | | | | | LSSLRSEDTAVY | | | | | | | |
| | DYYCSSRDSS | | | | | | | | YCARSRDLLLFP | | | | | | | |
| | GNHWVFGGG | | | | | | | | HHALSPWGRGT | | | | | | | |
| | TEL | | | | | | | | MVTVSS | | | | | | | |
| CD26 | QIVLTQSPAIM | 537 | SSVS | 538 | STS | 539 | QQRS | 540 | QVQLQQSGAELV | 541 | GYTF | 542 | IFPG | 543 | ARWT | 544 |
| | SASPGEKVTIT | | Y | | | | SYPN | | KPGASVKLSCKA | | RSY | | DGST | | VVGP | |
| | CSASSSVSYM | | | | | | T | | SGYTFRSYDINW | | D | | | | GYFD | |
| | NWFQQKPGTS | | | | | | | | VRQRPEQGLEWI | | | | | | V | |
| | PKLWIYSTSNL | | | | | | | | GWIFPGDGSTKY | | | | | | | |
| | ASGVPARFSG | | | | | | | | NEKFKGKATLTT | | | | | | | |
| | SGSGTSYSLTI | | | | | | | | DKSSSTAYMQLS | | | | | | | |
| | SRMEAEDAAT | | | | | | | | RLTSEDSAVYFC | | | | | | | |
| | YYCQQRSSYP | | | | | | | | ARWTVVGPGYF | | | | | | | |
| | NTFGGGTKLEI | | | | | | | | DVWGAGTTVTV | | | | | | | |
| | K | | | | | | | | SS | | | | | | | |
| CD262 | DIQMTQSPSSL | 545 | QDVG | 546 | WAS | 547 | QQY | 548 | EVQLVESGGGLV | 549 | GFTF | 550 | ISSG | 551 | ARRG | 552 |
| (DR5) | SASVGDRVTIT | | TA | | | | SSYR | | QPGGSLRLSCAA | | SSYV | | GSYT | | DSMI | |
| | CKASQDVGTA | | | | | | T | | SGFTFSSYVMSW | | | | | | TTDY | |
| | VAWYQQKPG | | | | | | | | VRQAPGKGLEW | | | | | | W | |
| | KAPKLLIYWA | | | | | | | | VATISSGGSYTY | | | | | | | |
| | STRHTGVPSRF | | | | | | | | YPDSVKGRFTISR | | | | | | | |
| | SGSGSGTDFTL | | | | | | | | DNAKNTLYLQM | | | | | | | |
| | TISSLQPEDFA | | | | | | | | NSLRAEDTAVYY | | | | | | | |
| | TYYCQQYSSY | | | | | | | | CARRGDSMITTD | | | | | | | |
| | RTFGQGTKVEI | | | | | | | | YWGQGTLVTVSS | | | | | | | |
| | K | | | | | | | | | | | | | | | |
| CD262 | SSELTQDPAVS | 553 | SLRS | 554 | GKN | 555 | NSRD | 556 | EVQLVQSGGGVE | 557 | GFTF | 558 | INWN | 559 | AKIL | 560 |
| (DR5) | VALGQTVRIT | | YY | | | | SSGN | | RPGGSLRLSCAA | | DDY | | GGST | | GAGR | |
| | CQGDSLRSYY | | | | | | HVV | | SGFTFDDYGMS | | G | | | | GWYF | |
| | ASWYQQKPG | | | | | | | | WVRQAPGKGLE | | | | | | DL | |
| | QAPVLVIYGK | | | | | | | | WVSGINWNGGS | | | | | | | |
| | NNRPSGIPDRF | | | | | | | | TGYADSVKGRVT | | | | | | | |
| | SGSSSGNTASL | | | | | | | | ISRDNAKNSLYL | | | | | | | |
| | TITGAQAEDE | | | | | | | | QMNSLRAEDTA | | | | | | | |
| | ADYYCNSRDS | | | | | | | | VYYCAKILGAGR | | | | | | | |
| | SGNHVVFGGG | | | | | | | | GWYFDLWGKGT | | | | | | | |
| | TKLTVL | | | | | | | | TVTVSS | | | | | | | |
| CD262 | EIVLTQSPGTL | 561 | QGIS | 562 | GAS | 563 | QQF | 564 | QVQLQESGPGLV | 565 | GGSI | 566 | IHNS | 567 | ARDR | 568 |
| (DR5) | SLSPGERATLS | | RSY | | | | GSSP | | KPSQTLSLTCTVS | | SSGD | | GTT | | GGDY | |
| | CRASQGISRSY | | | | | | WT | | GGSISSGDYFWS | | YF | | | | YYGM | |
| | LAWYQQKPG | | | | | | | | WIRQLPGKGLEW | | | | | | DV | |
| | QAPSLLIYGAS | | | | | | | | IGHIHNSGTTYYN | | | | | | | |
| | SRATGIPDRFS | | | | | | | | PSLKSRVTISVDT | | | | | | | |
| | GSGSGTDFTLT | | | | | | | | SKKQFSLRLSSVT | | | | | | | |
| | ISRLEPEDFAV | | | | | | | | AADTAVYYCAR | | | | | | | |
| | YYCQQFGSSP | | | | | | | | DRGGDYYYGMD | | | | | | | |
| | WTFGQGTKVE | | | | | | | | VWGQGTTVTVSS | | | | | | | |
| | IK | | | | | | | | | | | | | | | |
| CD27 | DIQMTQSPSSL | 569 | QGIS | 570 | AAS | 571 | QQY | 572 | QVQLVESGGGV | 573 | GFTF | 574 | IWYD | 575 | ARGSG | 576 |
| | SASVGDRVTIT | | RW | | | | NTYP | | VQPGRSLRLSCA | | SSYD | | GSNK | | NWGFF | |
| | CRASQGISRW | | | | | | RT | | ASGFTFSSYDMH | | | | | | DY | |
| | LAWYQQKPE | | | | | | | | WVRQAPGKGLE | | | | | | | |
| | KAPKSLIYAAS | | | | | | | | WVAVIWYDGSN | | | | | | | |
| | SLQSGVPSRFS | | | | | | | | KYYADSVKGRFT | | | | | | | |
| | GSGSGTDFTLT | | | | | | | | ISRDNSKNTLYL | | | | | | | |
| | ISSLQPEDFAT | | | | | | | | QMNSLRAEDTA | | | | | | | |
| | YYCQQYNTYP | | | | | | | | VYYCARGSGNW | | | | | | | |
| | RTFGQGTKVEI | | | | | | | | GFFDYWGQGTL | | | | | | | |
| | K | | | | | | | | VTVSS | | | | | | | |
| CD274 | QSALTQPASV | 577 | SSDV | 578 | DVS | 579 | SSYT | 580 | EVQLLESGGGLV | 581 | GFTF | 582 | IYPS | 583 | ARIK | 584 |
| (PD-L1) | SGSPGQSITISC | | GGYN | | | | SSST | | QPGGSLRLSCAA | | SSYI | | GGIT | | LGTV | |
| | TGTSSDVGGY | | Y | | | | RV | | SGFTFSSYIMMW | | | | | | TTVD | |
| | NYVSWYQQH | | | | | | | | VRQAPGKGLEW | | | | | | Y | |
| | PGKAPKLMIY | | | | | | | | VSSIYPSGGITFY | | | | | | | |
| | DVSNRPSGVS | | | | | | | | ADTVKGRFTISR | | | | | | | |
| | NRFSGSKSGN | | | | | | | | DNSKNTLYLQM | | | | | | | |
| | TASLTISGLQA | | | | | | | | NSLRAEDTAVYY | | | | | | | |
| | EDEADYYCSS | | | | | | | | CARIKLGTVTTV | | | | | | | |
| | YTSSSTRVFGT | | | | | | | | DYWGQGTLVTV | | | | | | | |
| | GTKVTVL | | | | | | | | SS | | | | | | | |
| CD274 | DIQMTQSPSSL | 585 | QDVST | 586 | SAS | 587 | QQY | 588 | EVQLVESGGGLV | 589 | GFTF | 590 | ISPY | 591 | ARRH | 592 |
| (PD-L1) | SASVGDRVTIT | | A | | | | LYHP | | QPGGSLRLSCAA | | SDS | | GGST | | WPGG | |
| | CRASQDVSTA | | | | | | AT | | SGFTFSDSWIHW | | W | | | | FDY | |
| | VAWYQQKPG | | | | | | | | VRQAPGKGLEW | | | | | | | |
| | KAPKLLIYSAS | | | | | | | | VAWISPYGGSTY | | | | | | | |
| | FLYSGVPSRFS | | | | | | | | YADSVKGRFTIS | | | | | | | |
| | GSGSGTDFTLT | | | | | | | | ADTSKNTAYLQ | | | | | | | |
| | ISSLQPEDFAT | | | | | | | | MNSLRAEDTAV | | | | | | | |
| | YYCQQYLYHP | | | | | | | | YYCARRHWPGG | | | | | | | |
| | ATFGQGTKVE | | | | | | | | FDYWGQGTLVT | | | | | | | |
| | IK | | | | | | | | VSS | | | | | | | |
| CD274 | EIVLTQSPGTL | 593 | QRVS | 594 | DAS | 595 | QQY | 596 | EVQLVESGGGLV | 597 | GFTF | 598 | IKQD | 599 | AREG | 600 |
| (PD-L1) | SLSPGERATLS | | SSY | | | | GSLP | | QPGGSLRLSCAA | | SRY | | GSEK | | GWFG | |
| | CRASQRVSSS | | | | | | WT | | SGFTFSRYWMS | | W | | | | ELAF | |
| | YLAWYQQKP | | | | | | | | WVRQAPGKGLE | | | | | | DY | |
| | GQAPRLLIYD | | | | | | | | WVANIKQDGSEK | | | | | | | |
| | ASSRATGIPDR | | | | | | | | YYVDSVKGRFTI | | | | | | | |
| | FSGSGSGTDFT | | | | | | | | SRDNAKNSLYLQ | | | | | | | |
| | LTISRLEPEDF | | | | | | | | MNSLRAEDTAV | | | | | | | |
| | AVYYCQQYGS | | | | | | | | YYCAREGGWFG | | | | | | | |
| | LPWTFGQGTK | | | | | | | | ELAFDYWGQGT | | | | | | | |
| | VEIK | | | | | | | | LVTVSS | | | | | | | |
| CD275 | DIQMTQSPSSL | 601 | QGIS | 602 | AAS | 603 | QQY | 604 | EVQLVESGGGLV | 605 | GFTF | 606 | IKQD | 607 | AREG | 608 |
| (ICOS-L) | SASVGDRVTIT | | NW | | | | DSYP | | QPGGSLRLSCAA | | SSY | | GNEK | | ILWF | |
| | CRASQGISNW | | | | | | RT | | SGFTFSSYWMSW | | W | | | | GDLP | |
| | LAWYQQKPE | | | | | | | | VRQAPGKGLEW | | | | | | TF | |
| | KAPKSLIYAAS | | | | | | | | VAYIKQDGNEKY | | | | | | | |
| | SLQSGVPSRFS | | | | | | | | YVDSVKGRFTIS | | | | | | | |
| | GSGSGTDFTLT | | | | | | | | RDNAKNSLYLQ | | | | | | | |
| | ISSLQPEDFAT | | | | | | | | MNSLRAEDTAV | | | | | | | |
| | YYCQQYDSYP | | | | | | | | YYCAREGILWFG | | | | | | | |
| | RTFGQGTKVEI | | | | | | | | DLPTFWGQGTLV | | | | | | | |
| | K | | | | | | | | TVSS | | | | | | | |
| CD276 | DIQLTQSPSFL | 609 | QNVD | 610 | SAS | 611 | QQY | 612 | EVQLVESGGGLV | 613 | GFTF | 614 | ISSD | 615 | GRGR | 616 |
| (B7H3) | SASVGDRVTIT | | TN | | | | NNY | | QPGGSLRLSCAA | | SSFG | | SSAI | | ENIY | |
| | CKASQNVDTN | | | | | | PFT | | SGFTFSSFGMHW | | | | | | YGSR | |
| | VAWYQQKPG | | | | | | | | VRQAPGKGLEW | | | | | | LDY | |
| | KAPKALIYSAS | | | | | | | | VAYISSDSSAIYY | | | | | | | |
| | YRYSGVPSRFS | | | | | | | | ADTVKGRFTISR | | | | | | | |
| | GSGSGTDFTLT | | | | | | | | DNAKNSLYLQM | | | | | | | |
| | ISSLQPEDFAT | | | | | | | | NSLRDEDTAVYY | | | | | | | |
| | YYCQQYNNYP | | | | | | | | CGRGRENIYYGS | | | | | | | |
| | FTFGQGTKLEI | | | | | | | | RLDYWGQGTTV | | | | | | | |
| | K | | | | | | | | TVSS | | | | | | | |
| CD276 | DIVMTQSPAT | 617 | QSIS | 618 | YAS | 619 | QNG | 620 | QVQLQQSGAELV | 621 | GYTF | 622 | IFPG | 623 | ARQT | 624 |
| (B7H3) | LSVTPGDRVS | | DY | | | | HSFP | | KPGASVKLSCKA | | TNY | | DGST | | TATW | |
| | LSCRASQSISD | | | | | | LT | | SGYTFTNYDINW | | D | | | | FAY | |
| | YLHWYQQKS | | | | | | | | VRQRPEQGLEWI | | | | | | | |
| | HESPRLLIKYA | | | | | | | | GWIFPGDGSTQY | | | | | | | |
| | SQSISGIPSRFS | | | | | | | | NEKFKGKATLTT | | | | | | | |
| | GSGSGSDFTLS | | | | | | | | DTSSSTAYMQLS | | | | | | | |
| | INSVEPEDVGV | | | | | | | | RLTSEDSAVYFC | | | | | | | |
| | YYCQNGHSFP | | | | | | | | ARQTTATWFAY | | | | | | | |
| | LTFGAGTKLE | | | | | | | | WGQGTLVTVSA | | | | | | | |
| | LK | | | | | | | | | | | | | | | |
| CD279 | DIQMTQSPSSL | 625 | LSIN | 626 | AAS | 627 | QQSS | 628 | EVQLLESGGVLV | 629 | GFTF | 630 | ISGG | 631 | VKWG | 632 |
| (PD-1) | SASVGDSITIT | | TF | | | | NTPF | | QPGGSLRLSCAA | | GSNF | | RDT | | NIYF | |
| | CRASLSINTFL | | | | | | T | | SGFTFSNFGMTW | | G | | DY | | | |
| | NWYQQKPGK | | | | | | | | VRQAPGKGLEW | | | | | | | |
| | APNLLIYAASS | | | | | | | | VSGISGGGRDTY | | | | | | | |
| | LHGGVPSRFS | | | | | | | | FADSVKGRFTISR | | | | | | | |
| | GSGSGTDFTLT | | | | | | | | DNSKNTLYLQM | | | | | | | |
| | IRTLQPEDFAT | | | | | | | | NSLKGEDTAVYY | | | | | | | |
| | YYCQQSSNTP | | | | | | | | CVKWGNIYFDY | | | | | | | |
| | FTFGPGTVVD | | | | | | | | WGQGTLVTVSS | | | | | | | |
| | FR | | | | | | | | | | | | | | | |
| CD279 | DIQMTQSPSSL | 633 | QTIG | 634 | TAT | 635 | QQV | 636 | EVQLVESGGGLV | 637 | GFTF | 638 | ISGG | 639 | ARQL | 640 |
| (PD-1) | SASVGDRVTIT | | TW | | | | YSIP | | QPGGSLRLSCAA | | SSY | | GANT | | YYFD | |
| | CLASQTIGTW | | | | | | WT | | SGFTFSSYMMSW | | M | | | | Y | |
| | LTWYQQKPG | | | | | | | | VRQAPGKGLEW | | | | | | | |
| | KAPKLLIYTAT | | | | | | | | VATISGGGANTY | | | | | | | |
| | SLADGVPSRFS | | | | | | | | YPDSVKGRFTISR | | | | | | | |
| | GSGSGTDFTLT | | | | | | | | DNAKNSLYLQM | | | | | | | |
| | ISSLQPEDFAT | | | | | | | | NSLRAEDTAVYY | | | | | | | |
| | YYCQQVYSIP | | | | | | | | CARQLYYFDYW | | | | | | | |
| | WTFGGGTKVE | | | | | | | | GQGTTVTVSS | | | | | | | |
| | IK | | | | | | | | | | | | | | | |
| CD279 | EIVLTQSPATL | 641 | QSVS | 642 | DAS | 643 | QQSS | 644 | QVQLVESGGGV | 645 | GITF | 646 | IWYD | 647 | ATND | 648 |
| (PD-1) | SLSPGERATLS | | SY | | | | NWP | | VQPGRSLRLDCK | | SNSG | | GSKR | | DY | |
| | CRASQSVSSY | | | | | | RT | | ASGITFSNSGMH | | | | | | | |
| | LAWYQQKPG | | | | | | | | WVRQAPGKGLE | | | | | | | |
| | QAPRLLIYDAS | | | | | | | | WVAVIWYDGSK | | | | | | | |
| | NRATGIPARFS | | | | | | | | RYYADSVKGRFT | | | | | | | |
| | GSGSGTDFTLT | | | | | | | | ISRDNSKNTLFLQ | | | | | | | |
| | ISSLEPEDFAV | | | | | | | | MNSLRAEDTAV | | | | | | | |
| | YYCQQSSNWP | | | | | | | | YYCATNDDYWG | | | | | | | |
| | RTFGQGTKVEI | | | | | | | | QGTLVTVSS | | | | | | | |
| | K | | | | | | | | | | | | | | | |
| CD279 | DIQMTQSPSSV | 649 | QGIS | 650 | AAS | 651 | QQA | 652 | QVQLVQSGAEV | 653 | GGTF | 654 | IIPM | 655 | ARAE | 656 |
| (PD-1) | SASVGDRVTIT | | SW | | | | NHLP | | KKPGSSVKVSCK | | SSYA | | FDTA | | HSST | |
| | CRASQGISSW | | | | | | FT | | ASGGTFSSYAIS | | | | | | GTFD | |
| | LAWYQQKPG | | | | | | | | WVRQAPGQGLE | | | | | | Y | |
| | KAPKLLISAAS | | | | | | | | WMGLIIPMFDTA | | | | | | | |
| | SLQSGVPSRFS | | | | | | | | GYAQKFQGRVAI | | | | | | | |
| | GSGSGTDFTLT | | | | | | | | TVDESTSTAYME | | | | | | | |
| | ISSLQPEDFAT | | | | | | | | LSSLRSEDTAVY | | | | | | | |
| | YYCQQANHLP | | | | | | | | YCARAEHSSTGT | | | | | | | |
| | FTFGGGTKVEI | | | | | | | | FDYWGQGTLVT | | | | | | | |
| | K | | | | | | | | VSS | | | | | | | |
| CD279 | QPVLTQPLSVS | 657 | NIGS | 658 | RDS | 659 | QVW | 660 | QVQLVQSGGGL | 661 | GFTF | 662 | IDTG | 663 | ARDE | 664 |
| (PD-1) | VALGQTARIT | | KN | | | | DSST | | VQPGGSLRLSCA | | SSY | | GGRT | | GGGT | |
| | CGGNNIGSKN | | | | | | AV | | ASGFTFSSYWMY | | W | | | | GWGV | |
| | VHWYQQKPG | | | | | | | | WVRQVPGKGLE | | | | | | LKDW | |
| | QAPVLVIYRD | | | | | | | | WVSAIDTGGGRT | | | | | | PYGL | |
| | SNRPSGIPERF | | | | | | | | YYADSVKGRFAI | | | | | | DA | |
| | SGSNSGNTAT | | | | | | | | SRVNAKNTMYL | | | | | | | |
| | LTISRAQAGDE | | | | | | | | QMNSLRAEDTA | | | | | | | |
| | ADYYCQVWD | | | | | | | | VYYCARDEGGG | | | | | | | |
| | SSTAVFGTGT | | | | | | | | TGWGVLKDWPY | | | | | | | |
| | KLTVL | | | | | | | | GLDAWGQGTLV | | | | | | | |
| | | | | | | | | | TVSS | | | | | | | |
| CD279 | EIVLTQSPATL | 665 | KGVS | 666 | LAS | 667 | QHSR | 668 | QVQLVQSGVEV | 669 | GYTF | 670 | INPS | 671 | ARRD | 672 |
| (PD-1) | SLSPGERATLS | | TSGY | | | | DLPL | | KKPGASVKVSCK | | TNY | | NGGT | | YRFD | |
| | CRASKGVSTS | | SY | | | | T | | ASGYTFTNYYM | | Y | | | | MGFD | |
| | GYSYLHWYQ | | | | | | | | YWVRQAPGQGL | | | | | | YW | |
| | QKPGQAPRLLI | | | | | | | | EWMGGINPSNGG | | | | | | | |
| | YLASYLESGV | | | | | | | | TNFNEKFKNRVT | | | | | | | |
| | PARFSGSGSGT | | | | | | | | LTTDSSTTTAYM | | | | | | | |
| | DFTLTISSLEPE | | | | | | | | ELKSLQFDDTAV | | | | | | | |
| | DFAVYYCQHS | | | | | | | | YYCARRDYRFD | | | | | | | |
| | RDLPLTFGGG | | | | | | | | MGFDYWGQGTT | | | | | | | |
| | TKVEIK | | | | | | | | VTVSS | | | | | | | |
| CD279 | EIVLTQSPATL | 673 | QSVR | 674 | DAS | 675 | QQR | 676 | VQLVQSGAEVK | 677 | GGTF | 678 | IIPI | 679 | ARPG | 680 |
| (PD-1) | SLSPGERATLS | | SY | | | | NYW | | KPGSSVKVSCKA | | SSYA | | FDTA | | LAAA | |
| | CRASQSVRSY | | | | | | PLT | | SGGTFSSYAISW | | | | | | YDTG | |
| | LAWYQQKPG | | | | | | | | VRQAPGQGLEW | | | | | | SLDY | |
| | QAPRLLIYDAS | | | | | | | | MGGIIPIFDTANY | | | | | | | |
| | NRATGIPARFS | | | | | | | | AQKFQGRVTITA | | | | | | | |
| | GSGSGTDFTLT | | | | | | | | DESTSTAYMELS | | | | | | | |
| | ISSLEPEDFAV | | | | | | | | SLRSEDTAVYYC | | | | | | | |
| | YYCQQRNYW | | | | | | | | ARPGLAAAYDTG | | | | | | | |
| | PLTFGQGTKV | | | | | | | | SLDYWGQGTLV | | | | | | | |
| | EIK | | | | | | | | TVSS | | | | | | | |
| CD3 | DIQLTQSPAIM | 681 | SSVS | 682 | DTS | 683 | QQW | 684 | DIKLQQSGAELA | 685 | GYTF | 686 | INPS | 687 | ARYY | 688 |
| | SASPGEKVTM | | Y | | | | SSNP | | RPGASVKMSCKT | | TRYT | | RGYT | | DDHY | |
| | TCRASSSVSY | | | | | | LT | | SGYTFTRYTMH | | | | | | CLDY | |
| | MNWYQQKSG | | | | | | | | WVKQRPGQGLE | | | | | | | |
| | TSPKRWIYDTS | | | | | | | | WIGYINPSRGYT | | | | | | | |
| | KVASGVPYRF | | | | | | | | NYNQKFKDKAT | | | | | | | |
| | SGSGSGTSYSL | | | | | | | | LTTDKSSSTAYM | | | | | | | |
| | TISSMEAEDA | | | | | | | | QLSSLTSEDSAV | | | | | | | |
| | ATYYCQQWSS | | | | | | | | YYCARYYDDHY | | | | | | | |
| | NPLTFGAGTK | | | | | | | | CLDYWGQGTTL | | | | | | | |
| | LELK | | | | | | | | TVSS | | | | | | | |
| CD3 | DIQLTQPNSVS | 689 | SGNI | 690 | DDD | 691 | HSY | 692 | EVQLLESGGGLV | 693 | GFTF | 694 | ISTS | 695 | AKFR | 696 |
| | TSLGSTVKLSC | | ENNY | | | | VSSF | | QPGGSLRLSCAA | | SSFP | | GGRT | | QYSG | |
| | TLSSGNIENNY | | | | | | NV | | SGFTFSSFPMAW | | | | | | GFDY | |
| | VHWYQLYEG | | | | | | | | VRQAPGKGLEW | | | | | | | |
| | RSPTTMIYDD | | | | | | | | VSTISTSGGRTYY | | | | | | | |
| | DKRPDGVPDR | | | | | | | | RDSVKGRFTISRD | | | | | | | |
| | FSGSIDRSSNS | | | | | | | | NSKNTLYLQMNS | | | | | | | |
| | AFLTIHNVAIE | | | | | | | | LRAEDTAVYYCA | | | | | | | |
| | DEAIYFCHSY | | | | | | | | KFRQYSGGFDY | | | | | | | |
| | VSSFNVFGGG | | | | | | | | WGQGTLVTVSS | | | | | | | |
| | TKLTVL | | | | | | | | | | | | | | | |
| CD3 | DIQMTQTTSSL | 697 | QDIR | 698 | YTS | 699 | QQG | 700 | EVQLQQSGPELV | 701 | GYSF | 702 | INPY | 703 | ARSG | 704 |
| | SASLGDRVTIS | | NY | | | | NTLP | | KPGASMKISCKA | | TGY | | KGVS | | YYGD | |
| | CRASQDIRNY | | | | | | WTF | | SGYSFTGYTMN | | T | | | | SDWY | |
| | LNWYQQKPD | | | | | | AGG | | WVKQSHGKNLE | | | | | | FDV | |
| | GTVKLLIYYTS | | | | | | | | WMGLINPYKGVS | | | | | | | |
| | RLHSGVPSKFS | | | | | | | | TYNQKFKDKATL | | | | | | | |
| | GSGSGTDYSL | | | | | | | | TVDKSSSTAYME | | | | | | | |
| | TISNLEQEDIA | | | | | | | | LLSLTSEDSAVY | | | | | | | |
| | TYFCQQGNTL | | | | | | | | YCARSGYYGDSD | | | | | | | |
| | PWTFAGGTKL | | | | | | | | WYFDVWGQGTT | | | | | | | |
| | EIK | | | | | | | | LTVFS | | | | | | | |
| CD3 | QTVVTQEPSL | 705 | TGAVT | 706 | GTK | 707 | VLW | 708 | EVQLVESGGGLV | 709 | GFTF | 710 | IRSK | 711 | VRHG | 712 |
| | TVSPGGTVTL | | SGNY | | | | YSNR | | QPGGSLKLSCAA | | NKY | | YNNY | | NFGN | |
| | TCGSSTGAVT | | | | | | WV | | SGFTFNKYAMN | | A | | AT | | SYIS | |
| | SGNYPNWVQ | | | | | | | | WVRQAPGKGLE | | | | | | YWAY | |
| | QKPGQAPRGL | | | | | | | | WVARIRSKYNNY | | | | | | | |
| | IGGTKFLAPGT | | | | | | | | ATYYADSVKDRF | | | | | | | |
| | PARFSGSLLGG | | | | | | | | TISRDDSKNTAY | | | | | | | |
| | KAALTLSGVQ | | | | | | | | LQMNNLKTEDT | | | | | | | |
| | PEDEAEYYCV | | | | | | | | AVYYCVRHGNF | | | | | | | |
| | LWYSNRWVF | | | | | | | | GNSYISYWAYW | | | | | | | |
| | GGGTKLTVL | | | | | | | | GQGTLVTVSS | | | | | | | |
| CD3 | DFVMTQSPDS | 713 | QSLL | 714 | WAS | 715 | QND | 716 | EVQLVQSGAELK | 717 | GYTF | 718 | IIPS | 719 | ARSH | 720 |
| | LAVSLGERVT | | NSGN | | | | YSYP | | KPGASVKVSCKA | | TDY | | NGAT | | LLRA | |
| | MSCKSSQSLL | | QKNY | | | | YT | | SGYTFTDYYMK | | Y | | | | SWFA | |
| | NSGNQKNYLT | | | | | | | | WVRQAPGQGLE | | | | | | YW | |
| | WYQQKPGQPP | | | | | | | | WIGDIIPSNGATF | | | | | | | |
| | KLLIYWASTR | | | | | | | | YNQKFKGRVTIT | | | | | | | |
| | ESGVPDRFSGS | | | | | | | | VDKSTSTAYMEL | | | | | | | |
| | GSGTDFTLTIS | | | | | | | | SSLRSEDTAVYY | | | | | | | |
| | SLQAEDVAVY | | | | | | | | CARSHLLRASWF | | | | | | | |
| | YCQNDYSYPY | | | | | | | | AYWGQGTLVTV | | | | | | | |
| | TFGQGTKLEIK | | | | | | | | SS | | | | | | | |
| CD3 | QIVLTQSPAIM | 721 | SSVS | 722 | DTS | 723 | QQW | 724 | QVQLQQSGAELA | 725 | GYTF | 726 | INPS | 727 | ARYY | 728 |
| | SASPGEKVTM | | Y | | | | SSNP | | RPGASVKMSCKA | | TRYT | | RGYT | | DDHY | |
| | TCSASSSVSY | | | | | | FT | | SGYTFTRYTMH | | | | | | CLDY | |
| | MNWYQQKSG | | | | | | | | WVKQRPGQGLE | | | | | | | |
| | TSPKRWIYDTS | | | | | | | | WIGYINPSRGYT | | | | | | | |
| | KLASGVPAHF | | | | | | | | NYNQKFKDKAT | | | | | | | |
| | RGSGSGTSYSL | | | | | | | | LTTDKSSSTAYM | | | | | | | |
| | TISGMEAEDA | | | | | | | | QLSSLTSEDSAV | | | | | | | |
| | ATYYCQQWSS | | | | | | | | YYCARYYDDHY | | | | | | | |
| | NPFTFGSGTKL | | | | | | | | CLDYWGQGTTL | | | | | | | |
| | EIN | | | | | | | | TVSS | | | | | | | |
| CD3 | EIVLTQSPATL | 729 | QSVS | 730 | DAS | 731 | QQRS | 732 | QVQLVESGGGV | 733 | GFKF | 734 | IWYD | 735 | ARQM | 736 |
| | SLSPGERATLS | | SY | | | | NWP | | VQPGRSLRLSCA | | SGY | | GSKK | | GYWH | |
| | CRASQSVSSY | | | | | | PLT | | ASGFKFSGYGMH | | G | | | | FDL | |
| | LAWYQQKPG | | | | | | | | WVRQAPGKGLE | | | | | | | |
| | QAPRLLIYDAS | | | | | | | | WVAVIWYDGSK | | | | | | | |
| | NRATGIPARFS | | | | | | | | KYYVDSVKGRFT | | | | | | | |
| | GSGSGTDFTLT | | | | | | | | ISRDNSKNTLYL | | | | | | | |
| | ISSLEPEDFAV | | | | | | | | QMNSLRAEDTA | | | | | | | |
| | YYCQQRSNWP | | | | | | | | VYYCARQMGYW | | | | | | | |
| | PLTFGGGTKV | | | | | | | | HFDLWGRGTLVT | | | | | | | |
| | EIK | | | | | | | | VSS | | | | | | | |
| CD3 | DIQMTQSPSSL | 737 | QSIS | 738 | AAS | 739 | QQS | 740 | QVQLVQSGAEV | 741 | GYTF | 742 | INPS | 743 | AKGT | 744 |
| | SASVGDRVTIT | | SY | | | | YSTP | | KKPGASVKVSCK | | TSYY | | GGST | | TGDW | |
| | CRASQSISSYL | | | | | | PT | | ASGYTFTSYYMH | | | | | | FDY | |
| | NWYQQKPGK | | | | | | | | WVRQAPGQGLE | | | | | | | |
| | APKLLIYAASS | | | | | | | | WMGIINPSGGSTS | | | | | | | |
| | LQSGVPSRFSG | | | | | | | | YAQKFQGRVTM | | | | | | | |
| | SGSGTDFTLTI | | | | | | | | TRDTSTSTVYME | | | | | | | |
| | SSLQPEDFATY | | | | | | | | LSSLRSEDTAVY | | | | | | | |
| | YCQQSYSTPPT | | | | | | | | YCAKGTTGDWF | | | | | | | |
| | FGQGTKVEIK | | | | | | | | DYWGQGTLVTV | | | | | | | |
| | | | | | | | | | SS | | | | | | | |
| CD30 | DIVLTQSPASL | 745 | QSVD | 746 | AAS | 747 | QQS | 748 | QIQLQQSGPEVV | 749 | GYTF | 750 | IYPG | 751 | ANYG | 752 |
| (TNFRS | AVSLGQRATIS | | FDGD | | | | NEDP | | KPGASVKISCKA | | TDY | | SGNT | | NYWF | |
| F8) | CKASQSVDFD | | SY | | | | WT | | SGYTFTDYYITW | | Y | | | | AY | |
| | GDSYMNWYQ | | | | | | | | VKQKPGQGLEWI | | | | | | | |
| | QKPGQPPKVLI | | | | | | | | GWIYPGSGNTKY | | | | | | | |
| | YAASNLESGIP | | | | | | | | NEKFKGKATLTV | | | | | | | |
| | ARFSGSGSGT | | | | | | | | DTSSSTAFMQLSS | | | | | | | |
| | DFTLNIHPVEE | | | | | | | | LTSEDTAVYFCA | | | | | | | |
| | EDAATYYCQQ | | | | | | | | NYGNYWFAYWG | | | | | | | |
| | SNEDPWTFGG | | | | | | | | QGTQVTVSA | | | | | | | |
| | GTKLEIK | | | | | | | | | | | | | | | |
| CD30 | DIQMTQSPTSL | 753 | QGIS | 754 | AAS | 755 | QQY | 756 | QVQLQQWGAGL | 757 | GGSF | 758 | INHG | 759 | ASLT | 760 |
| (TNFRS | SASVGDRVTIT | | SW | | | | DSYP | | LKPSETLSLTCAV | | SAY | | GGT | | AY | |
| F8) | CRASQGISSW | | | | | | IT | | YGGSFSAYYWS | | Y | | | | | |
| | LTWYQQKPEK | | | | | | | | WIRQPPGKGLEW | | | | | | | |
| | APKSLIYAASS | | | | | | | | IGDINHGGGTNY | | | | | | | |
| | LQSGVPSRFSG | | | | | | | | NPSLKSRVTISVD | | | | | | | |
| | SGSGTDFTLTI | | | | | | | | TSKNQFSLKLNS | | | | | | | |
| | SSLQPEDFATY | | | | | | | | VTAADTAVYYC | | | | | | | |
| | YCQQYDSYPI | | | | | | | | ASLTAYWGQGSL | | | | | | | |
| | TFGQGTRLEIK | | | | | | | | VTVSS | | | | | | | |
| CD319 | DIQMTQSPSSL | 761 | QDVG | 762 | WAS | 763 | QQY | 764 | EVQLVESGGGLV | 765 | GFDF | 766 | INPD | 767 | ARPD | 768 |
| (SLAMF | SASVGDRVTIT | | IA | | | | SSYP | | QPGGSLRLSCAA | | SRY | | SSTI | | GNYW | |
| 7) | CKASQDVGIA | | | | | | YT | | SGFDFSRYWMS | | W | | | | YFDV | |
| | VAWYQQKPG | | | | | | | | WVRQAPGKGLE | | | | | | | |
| | KVPKLLIYWA | | | | | | | | WIGEINPDSSTIN | | | | | | | |
| | STRHTGVPDR | | | | | | | | YAPSLKDKFIISR | | | | | | | |
| | FSGSGSGTDFT | | | | | | | | DNAKNSLYLQM | | | | | | | |
| | LTISSLQPEDV | | | | | | | | NSLRAEDTAVYY | | | | | | | |
| | ATYYCQQYSS | | | | | | | | CARPDGNYWYF | | | | | | | |
| | YPYTFGQGTK | | | | | | | | DVWGQGTLVTV | | | | | | | |
| | VEIK | | | | | | | | SS | | | | | | | |
| CD33 | DIVLTQSPTIM | 769 | SSVN | 770 | DTS | 771 | QQW | 772 | EVKLQESGPELV | 773 | GYK | 774 | INPY | 775 | ARDY | 776 |
| | SASPGERVTM | | Y | | | | RSYP | | KPGASVKMSCK | | FTDY | | NDGT | | RYEV | |
| | TCTASSSVNYI | | | | | | LT | | ASGYKFTDYVVH | | V | | | | YGMD | |
| | HWYQQKSGD | | | | | | | | WLKQKPGQGLE | | | | | | Y | |
| | SPLRWIFDTSK | | | | | | | | WIGYINPYNDGT | | | | | | | |
| | VASGVPARFS | | | | | | | | KYNEKFKGKATL | | | | | | | |
| | GSGSGTSYSLT | | | | | | | | TSDKSSSTAYME | | | | | | | |
| | ISTMEAEDAA | | | | | | | | VSSLTSEDSAVY | | | | | | | |
| | TYYCQQWRS | | | | | | | | YCARDYRYEVY | | | | | | | |
| | YPLTFGDGTR | | | | | | | | GMDYWGQGTSV | | | | | | | |
| | LELK | | | | | | | | TVSS | | | | | | | |
| CD33 | DIVMTQSPSSL | 777 | QDIN | 778 | YTS | 779 | LQY | 780 | EVKLQQSGPELV | 781 | GYSF | 782 | IDPY | 783 | AREM | 784 |
| | SASLGGKVTIT | | KY | | | | DNLL | | KPGTSVKVSCKA | | TDY | | KGGT | | ITAY | |
| | CKASQDINKYI | | | | | | T | | SGYSFTDYNMY | | N | | | | YFDY | |
| | AWYQHKPGK | | | | | | | | WVKQSHGKSLE | | | | | | | |
| | GPRLLIHYTST | | | | | | | | WIGYIDPYKGGTI | | | | | | | |
| | LQPGIPSRFSG | | | | | | | | YNQKFKGKATLT | | | | | | | |
| | SGSGRDYSFSI | | | | | | | | VDKSSSTAFMHL | | | | | | | |
| | SNLEPEDIATY | | | | | | | | NSLTSEDSAVYY | | | | | | | |
| | YCLQYDNLLT | | | | | | | | CAREMITAYYFD | | | | | | | |
| | FGAGTKLELK | | | | | | | | YWGQGSSVTVSS | | | | | | | |
| CD33 | DIVLTQSPASL | 785 | ESVD | 786 | AAS | 787 | QQS | 788 | EVQLQQSGPELV | 789 | GYTF | 790 | IYPY | 791 | ARGR | 792 |
| | AVSLGQRATIS | | NYGI | | | | KEVP | | KPGASVKISCKA | | TDY | | NGGT | | PAMD | |
| | CRASESVDNY | | SF | | | | WT | | SGYTFTDYNMH | | N | | | | Y | |
| | GISFMNWFQQ | | | | | | | | WVKQSHGKSLE | | | | | | | |
| | KPGQPPKLLIY | | | | | | | | WIGYIYPYNGGT | | | | | | | |
| | AASNQGSGVP | | | | | | | | GYNQKFKSKATL | | | | | | | |
| | ARFSGSGSGT | | | | | | | | TVDNSSSTAYMD | | | | | | | |
| | DFSLNIHPMEE | | | | | | | | VRSLTSEDSAVY | | | | | | | |
| | DDTAMYFCQ | | | | | | | | YCARGRPAMDY | | | | | | | |
| | QSKEVPWTFG | | | | | | | | WGQGTSVTVSS | | | | | | | |
| | GGTKLEIK | | | | | | | | | | | | | | | |
| CD33 | DIQLTQSPSTL | 793 | ESLD | 794 | AAS | 795 | QQT | 796 | EVQLVQSGAEVK | 797 | GYTI | 798 | IYPYN | 799 | VNGNP | 800 |
| | SASVGDRVTIT | | NYGI | | | | KEVP | | KPGSSVKVSCKA | | TDSN | | GGT | | WLAY | |
| | CRASESLDNY | | RF | | | | WS | | SGYTITDSNIHW | | | | | | | |
| | GIRFLTWFQQ | | | | | | | | VRQAPGQSLEWI | | | | | | | |
| | KPGKAPKLLM | | | | | | | | GYIYPYNGGTDY | | | | | | | |
| | YAASNQGSGV | | | | | | | | NQKFKNRATLTV | | | | | | | |
| | PSRFSGSGSGT | | | | | | | | DNPTNTAYMELS | | | | | | | |
| | EFTLTISSLQP | | | | | | | | SLRSEDTAFYYC | | | | | | | |
| | DDFATYYCQQ | | | | | | | | VNGNPWLAYWG | | | | | | | |
| | TKEVPWSFGQ | | | | | | | | QGTLVTVSS | | | | | | | |
| | GTKVEVK | | | | | | | | | | | | | | | |
| CD33 | NIMLTQSPSSL | 801 | QSVF | 802 | WAS | 803 | HQY | 804 | QVQLQQPGAEV | 805 | GYTF | 806 | IYPG | 807 | AREV | 808 |
| | AVSAGEKVTM | | FSSS | | | | LSSR | | VKPGASVKMSC | | TSYY | | NDDI | | RLRY | |
| | SCKSSQSVFFS | | QKNY | | | | T | | KASGYTFTSYYI | | | | | | FDV | |
| | SSQKNYLAWY | | | | | | | | HWIKQTPGQGLE | | | | | | | |
| | QQIPGQSPKLL | | | | | | | | WVGVIYPGNDDI | | | | | | | |
| | IYWASTRESG | | | | | | | | SYNQKFKGKATL | | | | | | | |
| | VPDRFTGSGS | | | | | | | | TADKSSTTAYMQ | | | | | | | |
| | GTDFTLTISSV | | | | | | | | LSSLTSEDSAVY | | | | | | | |
| | QSEDLAIYYC | | | | | | | | YCAREVRLRYFD | | | | | | | |
| | HQYLSSRTFG | | | | | | | | VWGAGTTVTVSS | | | | | | | |
| | GGTKLEIK | | | | | | | | | | | | | | | |
| CD33 | DIKMTQSPSS | 809 | QDIN | 810 | RAN | 811 | LQY | 812 | QVQLQQSGPELV | 813 | GYTF | 814 | IYPG | 815 | ASGY | 816 |
| | MYASLGERVII | | SY | | | | DEFP | | RPGTFVKISCKAS | | TNY | | DGST | | EDAM | |
| | NCKASQDINS | | | | | | LT | | GYTFTNYDINWV | | D | | | | DY | |
| | YLSWFQQKPG | | | | | | | | NQRPGQGLEWIG | | | | | | | |
| | KSPKTLIYRAN | | | | | | | | WIYPGDGSTKYN | | | | | | | |
| | RLVDGVPSRF | | | | | | | | EKFKAKATLTAD | | | | | | | |
| | SGSGSGQDYS | | | | | | | | KSSSTAYLQLNN | | | | | | | |
| | LTISSLEYEDM | | | | | | | | LTSENSAVYFCA | | | | | | | |
| | GIYYCLQYDE | | | | | | | | SGYEDAMDYWG | | | | | | | |
| | FPLTFGAGTKL | | | | | | | | QGTSVTVSS | | | | | | | |
| | ELK | | | | | | | | | | | | | | | |
| CD33 | DIQMTQSPSSL | 817 | ESVD | 818 | AAS | 819 | QQS | 820 | QVQLVQSGAEV | 821 | GYTF | 822 | IYPY | 823 | ARGR | 824 |
| | SASVGDRVTIT | | NYGI | | | | KEVP | | KKPGSSVKVSCK | | TDY | | NGGT | | PAMD | |
| | CRASESVDNY | | SF | | | | WT | | ASGYTFTDYNM | | N | | | | YW | |
| | GISFMNWFQQ | | | | | | | | HWVRQAPGQGL | | | | | | | |
| | KPGKAPKLLL | | | | | | | | EWLGYIYPYNGG | | | | | | | |
| | YAASNQGSGV | | | | | | | | TGYNQKFKSKAT | | | | | | | |
| | PSRFSGSGSGT | | | | | | | | ITADESTNTAYM | | | | | | | |
| | DFTLTISSLQP | | | | | | | | ELSSLRSEDTAV | | | | | | | |
| | DDFATYYCQQ | | | | | | | | YYCARGRPAMD | | | | | | | |
| | SKEVPWTFGQ | | | | | | | | YWGQGTLVTVSS | | | | | | | |
| | GTKVELK | | | | | | | | | | | | | | | |
| CD332 | QSVLTQPPSAS | 825 | SSNI | 826 | ENY | 827 | SSW | 828 | EVQLLESGGGLV | 829 | GFTF | 830 | ISGS | 831 | ARVR | 832 |
| (FGFR2) | GTPGQRVTISC | | GNNY | | N | | DDSL | | QPGGSLRLSCAA | | SSYA | | GTST | | YNWN | |
| | SGSSSNIGNNY | | | | | | NYW | | SGFTFSSYAMSW | | | | | | HGDW | |
| | VSWYQQLPGT | | | | | | V | | VRQAPGKGLEW | | | | | | FDP | |
| | APKLLIYENY | | | | | | | | VSAISGSGTSTYY | | | | | | | |
| | NRPAGVPDRF | | | | | | | | ADSVKGRFTISR | | | | | | | |
| | SGSKSGTSASL | | | | | | | | DNSKNTLYLQM | | | | | | | |
| | AISGLRSEDEA | | | | | | | | NSLRAEDTAVYY | | | | | | | |
| | DYYCSSWDDS | | | | | | | | CARVRYNWNHG | | | | | | | |
| | LNYWVFGGG | | | | | | | | DWFDPWGQGTL | | | | | | | |
| | TKLTVL | | | | | | | | VTVSS | | | | | | | |
| CD350 | DIQMTQSPASL | 833 | ENIY | 834 | VAT | 835 | QHF | 836 | EVQLQQSGAELV | 837 | GFNI | 838 | IDPA | 839 | ARGA | 840 |
| (FZD | SVSVGETVTIT | | SN | | | | WGT | | KPGASVKLSCTA | | NDT | | NGNT | | RGSR | |
| 10) | CRASENIYSNL | | | | | | PYT | | SGFNINDTYMHW | | Y | | | | FAY | |
| | AWYQQKQGK | | | | | | | | VKQRPEQGLEWI | | | | | | | |
| | SPQLLVYVAT | | | | | | | | GRIDPANGNTKY | | | | | | | |
| | NLADGVPSRF | | | | | | | | DPKFQGKATITA | | | | | | | |
| | SGSGSGTQYS | | | | | | | | DTSSNTAYLQLS | | | | | | | |
| | LKINSLQSEDF | | | | | | | | SLTSEDTAVYYC | | | | | | | |
| | GSYYCQHFW | | | | | | | | ARGARGSRFAY | | | | | | | |
| | GTPYTFGGGT | | | | | | | | WGQGTLVTVSA | | | | | | | |
| | KLEIK | | | | | | | | | | | | | | | |
| CD37 | DIQMTQSPSSL | 841 | ENIR | 842 | VAT | 843 | QHY | 844 | QVQVQESGPGLV | 845 | GFSL | 846 | IWGD | 847 | AKGG | 848 |
| | SVSVGERVTIT | | SN | | | | WGT | | APSQTLSITCTVS | | TTSG | | GST | | YSLA | |
| | CRASENIRSNL | | | | | | TWT | | GFSLTTSGVSWV | | | | | | H | |
| | AWYQQKPGK | | | | | | | | RQPPGKGLEWLG | | | | | | | |
| | SPKLLVNVAT | | | | | | | | VIWGDGSTNYHP | | | | | | | |
| | NLADGVPSRF | | | | | | | | SLKSRLSIKKDHS | | | | | | | |
| | SGSGSGTDYS | | | | | | | | KSQVFLKLNSLT | | | | | | | |
| | LKINSLQPEDF | | | | | | | | AADTATYYCAK | | | | | | | |
| | GTYYCQHYW | | | | | | | | GGYSLAHWGQG | | | | | | | |
| | GTTWTFGQGT | | | | | | | | TLVTVSS | | | | | | | |
| | KLEIK | | | | | | | | | | | | | | | |
| CD371 | DIQMTQSPSSL | 849 | QSIS | 850 | AAS | 851 | QQS | 852 | QVQLVQSGGGV | 853 | GFTF | 854 | IWYN | 855 | TRGT | 856 |
| (CLEC1 | SASVGDRVTIT | | SY | | | | YSTP | | VQPGRSLRLSCV | | SSYG | | ARKQ | | GYNW | |
| 2A) | CRASQSISSYL | | | | | | PT | | ASGFTFSSYGMH | | | | | | FDP | |
| | NWYQQKPGK | | | | | | | | WVRQAPGKGLE | | | | | | | |
| | APKLLIYAASS | | | | | | | | WVAAIWYNARK | | | | | | | |
| | LQSGVPSRFSG | | | | | | | | QDYADSVKGRFT | | | | | | | |
| | SGSGTDFTLTI | | | | | | | | ISRDNSKNTLYL | | | | | | | |
| | SSLQPEDFATY | | | | | | | | QMNSLRAEDTA | | | | | | | |
| | YCQQSYSTPPT | | | | | | | | VYYCTRGTGYN | | | | | | | |
| | FGQGTKVEIK | | | | | | | | WFDPWGQGTLV | | | | | | | |
| | | | | | | | | | TVSS | | | | | | | |
| CD38 | DIVMAQSHKF | 857 | ASQD | 858 | ITSA | 859 | TCQ | 860 | QVKLVESGGGLV | 861 | GFTF | 862 | ISIG | 863 | TRDF | 864 |
| | MSTSVGDRVS | | VS | | | | QHY | | KPGGSLKLSCEA | | SSYT | | GRYT | | NGTS | |
| | ITCKASQDVST | | | | | | SPYT | | SGFTFSSYTLSW | | | | | | DF | |
| | VVAWYQQKP | | | | | | | | VRQTPETRLEWV | | | | | | | |
| | GQSPKRLITSA | | | | | | | | ATISIGGRYTTTP | | | | | | | |
| | SYRYIGVPDRF | | | | | | | | DSVEGRFTISRDN | | | | | | | |
| | TGSGSGTDFTF | | | | | | | | AKNTLYLQMNSL | | | | | | | |
| | TISSVQAEDLA | | | | | | | | KSEDTAMYYCTR | | | | | | | |
| | VTTCQQHYSP | | | | | | | | DFNGTSDFWGQ | | | | | | | |
| | YTFGGGTKLEI | | | | | | | | GTTLTVSS | | | | | | | |
| | K | | | | | | | | | | | | | | | |
| CD38 | EIVLTQSPATL | 865 | QSVS | 866 | DAS | 867 | QQRS | 868 | EVQLLESGGGLV | 869 | GFTF | 870 | ISGS | 871 | AKDK | 872 |
| | SLSPGERATLS | | SY | | | | NWP | | QPGGSLRLSCAV | | NSFA | | GGGT | | ILWF | |
| | CRASQSVSSY | | | | | | PT | | SGFTFNSFAMSW | | | | | | GEPV | |
| | LAWYQQKPG | | | | | | | | VRQAPGKGLEW | | | | | | FDY | |
| | QAPRLLIYDAS | | | | | | | | VSAISGSGGGTY | | | | | | | |
| | NRATGIPARFS | | | | | | | | YADSVKGRFTIS | | | | | | | |
| | GSGSGTDFTLT | | | | | | | | RDNSKNTLYLQ | | | | | | | |
| | ISSLEPEDFAV | | | | | | | | MNSLRAEDTAV | | | | | | | |
| | YYCQQRSNWP | | | | | | | | YFCAKDKILWFG | | | | | | | |
| | PTFGQGTKVEI | | | | | | | | EPVFDYWGQGTL | | | | | | | |
| | K | | | | | | | | VTVSS | | | | | | | |
| CD38 | DIVMTQSHLS | 873 | QDVS | 874 | SAS | 875 | QQH | 876 | QVQLVQSGAEV | 877 | GYTF | 878 | IYPG | 879 | ARGDY | 880 |
| | MSTSLGDPVSI | | TV | | | | YSPP | | AKPGTSVKLSCK | | TDY | | GDT | | DYGS | |
| | TCKASQDVST | | | | | | YT | | ASGYTFTDYWM | | W | | | | NSLD | |
| | VVAWYQQKP | | | | | | | | QWVKQRPGQGL | | | | | | Y | |
| | GQSPRRLIYSA | | | | | | | | EWIGTIYPGDGD | | | | | | | |
| | SYRYIGVPDRF | | | | | | | | TGYAQKFQGKA | | | | | | | |
| | TGSGAGTDFT | | | | | | | | TLTADKSSKTVY | | | | | | | |
| | FTISSVQAEDL | | | | | | | | MHLSSLASEDSA | | | | | | | |
| | AVYYCQQHYS | | | | | | | | VYYCARGDYYG | | | | | | | |
| | PPYTFGGGTK | | | | | | | | SNSLDYWGQGTS | | | | | | | |
| | LEIK | | | | | | | | VTVSS | | | | | | | |
| CD4 | DIVMTQSPDSL | 881 | KSVS | 882 | LAS | 883 | QHSR | 884 | EEQLVESGGGLV | 885 | GFSF | 886 | ISVK | 887 | SASY | 888 |
| | AVSLGERATIN | | TSGY | | | | ELP | | KPGGSLRLSCAA | | SDCR | | SENY | | YRYD | |
| | CRASKSVSTS | | SY | | | | WT | | SGFSFSDCRMYW | | | | GA | | VGAW | |
| | GYSYIYWYQQ | | | | | | | | LRQAPGKGLEWI | | | | | | FAYW | |
| | KPGQPPKLLIY | | | | | | | | GVISVKSENYGA | | | | | | | |
| | LASILESGVPD | | | | | | | | NYAESVRGRFTIS | | | | | | | |
| | RFSGSGSGTDF | | | | | | | | RDDSKNTVYLQ | | | | | | | |
| | TLTISSLQAED | | | | | | | | MNSLKTEDTAVY | | | | | | | |
| | VAVYYCQHSR | | | | | | | | YCSASYYRYDVG | | | | | | | |
| | ELPWTFGQGT | | | | | | | | AWFAYWGQGTL | | | | | | | |
| | KVEIK | | | | | | | | VTVSS | | | | | | | |
| CD4 | DIVMTQSPDSL | 889 | QSLL | 890 | WAS | 891 | QQY | 892 | QVQLQQSGPEVV | 893 | GYTF | 894 | INPY | 895 | AREK | 896 |
| | AVSLGERVTM | | YSTN | | | | YSYR | | KPGASVKMSCK | | TSYV | | NDGT | | DNYA | |
| | NCKSSQSLLYS | | QKNY | | | | T | | ASGYTFTSYVIH | | | | | | TGAW | |
| | TNQKNYLAW | | | | | | | | WVRQKPGQGLD | | | | | | FAY | |
| | YQQKPGQSPK | | | | | | | | WIGYINPYNDGT | | | | | | | |
| | LLIYWASTRES | | | | | | | | DYDEKFKGKATL | | | | | | | |
| | GVPDRFSGSG | | | | | | | | TSDTSTSTAYME | | | | | | | |
| | SGTDFTLTISS | | | | | | | | LSSLRSEDTAVY | | | | | | | |
| | VQAEDVAVY | | | | | | | | YCAREKDNYAT | | | | | | | |
| | YCQQYYSYRT | | | | | | | | GAWFAYWGQGT | | | | | | | |
| | FGGGTKLEIK | | | | | | | | LVTVSS | | | | | | | |
| CD40 | DIQMTQSPSSL | 897 | QSLV | 898 | TVS | 899 | SQTT | 900 | EVQLVESGGGLV | 901 | GYSF | 902 | VIPN | 903 | AREG | 904 |
| | SASVGDRVTIT | | HSNG | | | | HVP | | QPGGSLRLSCAA | | TGY | | AGGT | | IYW | |
| | CRSSQSLVHS | | NTF | | | | WT | | SGYSFTGYYIHW | | Y | | | | | |
| | NGNTFLHWY | | | | | | | | VRQAPGKGLEW | | | | | | | |
| | QQKPGKAPKL | | | | | | | | VARVIPNAGGTS | | | | | | | |
| | LIYTVSNRFSG | | | | | | | | YNQKFKGRFTLS | | | | | | | |
| | VPSRFSGSGSG | | | | | | | | VDNSKNTAYLQ | | | | | | | |
| | TDFTLTISSLQ | | | | | | | | MNSLRAEDTAV | | | | | | | |
| | PEDFATYFCSQ | | | | | | | | YYCAREGIYWW | | | | | | | |
| | TTHVPWTFGQ | | | | | | | | GQGTLVTVSS | | | | | | | |
| | GTKVEIK | | | | | | | | | | | | | | | |
| CD40 | AIQLTQSPSSL | 905 | QGIS | 906 | DAS | 907 | QQF | 908 | QLQLQESGPGLL | 909 | GGSI | 910 | IYKS | 911 | TRPV | 912 |
| | SASVGDRVTIT | | SA | | | | NSYP | | KPSETLSLTCTVS | | SSPG | | GST | | VRYF | |
| | CRASQGISSAL | | | | | | T | | GGSISSPGYYGG | | YY | | | | GWFD | |
| | AWYQQKPGK | | | | | | | | WIRQPPGKGLEW | | | | | | P | |
| | APKLLIYDASN | | | | | | | | IGSIYKSGSTYHN | | | | | | | |
| | LESGVPSRFSG | | | | | | | | PSLKSRVTISVDT | | | | | | | |
| | SGSGTDFTLTI | | | | | | | | SKNQFSLKLSSVT | | | | | | | |
| | SSLQPEDFATY | | | | | | | | AADTAVYYCTRP | | | | | | | |
| | YCQQFNSYPT | | | | | | | | VVRYFGWFDPW | | | | | | | |
| | FGQGTKVEIK | | | | | | | | GQGTLVTVSS | | | | | | | |
| CD40 | DIVMTQSPLSL | 913 | QSLL | 914 | LGS | 915 | MQA | 916 | QVQLVESGGGV | 917 | GFTF | 918 | ISYE | 919 | ARDG | 920 |
| | TVTPGEPASIS | | YSNG | | | | RQTP | | VQPGRSLRLSCA | | SSYG | | ESNR | | GIAA | |
| | CRSSQSLLYSN | | YNY | | | | FT | | ASGFTFSSYGMH | | | | | | PGPD | |
| | GYNYLDWYL | | | | | | | | WVRQAPGKGLE | | | | | | Y | |
| | QKPGQSPQVLI | | | | | | | | WVAVISYEESNR | | | | | | | |
| | SLGSNRASGV | | | | | | | | YHADSVKGRFTI | | | | | | | |
| | PDRFSGSGSGT | | | | | | | | SRDNSKITLYLQ | | | | | | | |
| | DFTLKISRVEA | | | | | | | | MNSLRTEDTAVY | | | | | | | |
| | EDVGVYYCM | | | | | | | | YCARDGGIAAPG | | | | | | | |
| | QARQTPFTFGP | | | | | | | | PDYWGQGTLVT | | | | | | | |
| | GTKVDIR | | | | | | | | VSS | | | | | | | |
| CD40 | DIQMTQSPSSV | 921 | QGIY | 922 | TAS | 923 | QQA | 924 | QVQLVQSGAEV | 925 | GYTF | 926 | INPD | 927 | ARDQ | 928 |
| | SASVGDRVTIT | | SW | | | | NIFP | | KKPGASVKVSCK | | TGY | | SGGT | | PLGY | |
| | CRASQGIYSW | | | | | | LT | | ASGYTFTGYYM | | Y | | | | CTNG | |
| | LAWYQQKPG | | | | | | | | HWVRQAPGQGL | | | | | | VCSY | |
| | KAPNLLIYTAS | | | | | | | | EWMGWINPDSG | | | | | | FDY | |
| | TLQSGVPSRFS | | | | | | | | GTNYAQKFQGR | | | | | | | |
| | GSGSGTDFTLT | | | | | | | | VTMTRDTSISTA | | | | | | | |
| | ISSLQPEDFAT | | | | | | | | YMELNRLRSDDT | | | | | | | |
| | YYCQQANIFP | | | | | | | | AVYYCARDQPL | | | | | | | |
| | LTFGGGTKVEI | | | | | | | | GYCTNGVCSYFD | | | | | | | |
| | K | | | | | | | | YWGQGTLVTVSS | | | | | | | |
| CD40L | DIQMTQSPSSL | 929 | EDLY | 930 | DTY | 931 | QQY | 932 | EVQLVESGGGLV | 933 | GFSS | 934 | IWGD | 935 | ARQL | 936 |
| | SASVGDRVTIT | | YN | | | | YKFP | | QPGGSLRLSCAV | | TNY | | GDT | | THYY | |
| | CRASEDLYYN | | | | | | FT | | SGFSSTNYHVHW | | H | | | | VLAA | |
| | LAWYQRKPG | | | | | | | | VRQAPGKGLEW | | | | | | | |
| | KAPKLLIYDT | | | | | | | | MGVIWGDGDTS | | | | | | | |
| | YRLADGVPSR | | | | | | | | YNSVLKSRFTISR | | | | | | | |
| | FSGSGSGTDY | | | | | | | | DTSKNTVYLQM | | | | | | | |
| | TLTISSLQPED | | | | | | | | NSLRAEDTAVYY | | | | | | | |
| | FASYYCQQYY | | | | | | | | CARQLTHYYVLA | | | | | | | |
| | KFPFTFGQGT | | | | | | | | AWGQGTLVTVSS | | | | | | | |
| | KVEIK | | | | | | | | | | | | | | | |
| CD40L | DIVLTQSPATL | 937 | QRVS | 938 | YAS | 939 | QHS | 940 | QVQLVQSGAEV | 941 | GYIF | 942 | INPS | 943 | TRSD | 944 |
| | SVSPGERATIS | | SSTY | | | | WEIP | | VKPGASVKLSCK | | TSYY | | NGDT | | GRND | |
| | CRASQRVSSST | | SY | | | | PT | | ASGYIFTSYYMY | | | | | | MDS | |
| | YSYMHWYQQ | | | | | | | | WVKQAPGQGLE | | | | | | | |
| | KPGQPPKLLIK | | | | | | | | WIGEINPSNGDT | | | | | | | |
| | YASNLESGVP | | | | | | | | NFNEKFKSKATL | | | | | | | |
| | ARFSGSGSGT | | | | | | | | TVDKSASTAYME | | | | | | | |
| | DFTLTISSVEP | | | | | | | | LSSLRSEDTAVY | | | | | | | |
| | EDFATYYCQH | | | | | | | | YCTRSDGRNDM | | | | | | | |
| | SWEIPPTFGGG | | | | | | | | DSWGQGTLVTVS | | | | | | | |
| | TKLEIK | | | | | | | | S | | | | | | | |
| | DFVMTQSPAF | | | | | | | | | | | | | | | |
| CD49b | LSVTPGEKVTI | 945 | SSVN | 946 | DTS | 947 | QQW | 948 | QVQLQESGPGLV | 949 | GFSL | 950 | IWAR | 951 | ARAN | 952 |
| (a2) | TCSAQSSVNYI | | Y | | | | TTNP | | KPSETLSLTCTVS | | TNY | | GFT | | DGVY | |
| | HWYQQKPDQ | | | | | | LT | | GFSLTNYGIHWIR | | G | | | | YAMD | |
| | APKKLIYDTSK | | | | | | | | QPPGKGLEWLGV | | | | | | Y | |
| | LASGVPSRFSG | | | | | | | | IWARGFTNYNSA | | | | | | | |
| | SGSGTDYTFTI | | | | | | | | LMSRLTISKDNS | | | | | | | |
| | SSLEAEDAAT | | | | | | | | KNQVSLKLSSVT | | | | | | | |
| | YYCQQWTTNP | | | | | | | | AADTAVYYCAR | | | | | | | |
| | LTFGQGTKVEI | | | | | | | | ANDGVYYAMDY | | | | | | | |
| | K | | | | | | | | WGQGTLVTVSS | | | | | | | |
| CD51 | DIQMTQSPSSL | 953 | QDIS | 954 | YTS | 955 | QQG | 956 | QVQLQQSGGELA | 957 | GYTF | 958 | INPRS | 959 | ASFL | 960 |
| (a5) | SASVGDRVTIT | | NY | | | | NTFP | | KPGASVKVSCKA | | SSFW | | GYT | | GRGA | |
| | CRASQDISNYL | | | | | | YT | | SGYTFSSFWMH | | | | | | MDY | |
| | AWYQQKPGK | | | | | | | | WVRQAPGQGLE | | | | | | | |
| | APKLLIYYTSK | | | | | | | | WIGYINPRSGYTE | | | | | | | |
| | IHSGVPSRFSG | | | | | | | | YNEIFRDKATMT | | | | | | | |
| | SGSGTDYTFTI | | | | | | | | TDTSTSTAYMEL | | | | | | | |
| | SSLQPEDIATY | | | | | | | | SSLRSEDTAVYY | | | | | | | |
| | YCQQGNTFPY | | | | | | | | CASFLGRGAMD | | | | | | | |
| | TFGQGTKVEI | | | | | | | | YWGQGTTVTVSS | | | | | | | |
| | K | | | | | | | | | | | | | | | |
| CD52 | DIQMTQSPSSL | 961 | QNID | 962 | NTN | 963 | LQHI | 964 | QVQLQESGPGLV | 965 | GFTF | 966 | IRDK | 967 | AREG | 968 |
| | SASVGDRVTIT | | KY | | | | SRPR | | RPSQTLSLTCTVS | | TDFY | | AKGY | | HTAA | |
| | CKASQNIDKY | | | | | | T | | GFTFTDFYMNW | | | | TT | | PFDY | |
| | LNWYQQKPG | | | | | | | | VRQPPGRGLEWI | | | | | | | |
| | KAPKLLIYNT | | | | | | | | GFIRDKAKGYTT | | | | | | | |
| | NNLQTGVPSR | | | | | | | | EYNPSVKGRVTM | | | | | | | |
| | FSGSGSGTDFT | | | | | | | | LVDTSKNQFSLR | | | | | | | |
| | FTISSLQPEDIA | | | | | | | | LSSVTAADTAVY | | | | | | | |
| | TYYCLQHISRP | | | | | | | | YCAREGHTAAPF | | | | | | | |
| | RTFGQGTKVEI | | | | | | | | DYWGQGSLVTV | | | | | | | |
| | K | | | | | | | | SS | | | | | | | |
| CD54(IC | QSVLTQPPSAS | 969 | SSNI | 970 | DNN | 971 | QSY | 972 | EVQLLESGGGLV | 973 | GFTF | 974 | IWYD | 975 | ARYS | 976 |
| AM-1) | GTPGQRVTISC | | GAGY | | | | DSSL | | QPGGSLRLSCAA | | SNA | | GSNK | | GWYF | |
| | TGSSSNIGAGY | | D | | | | SAW | | SGFTFSNAWMS | | W | | | | Y | |
| | DVHWYQQLP | | | | | | L | | WVRQAPGKGLE | | | | | | | |
| | GTAPKLLIYD | | | | | | | | WVAFIWYDGSN | | | | | | | |
| | NNNRPSGVPD | | | | | | | | KYYADSVKGRFT | | | | | | | |
| | RFSGSKSGTSA | | | | | | | | ISRDNSKNTLYL | | | | | | | |
| | SLAISGLRSED | | | | | | | | QMNSLRAEDTA | | | | | | | |
| | EADYYCQSYD | | | | | | | | VYYCARYSGWY | | | | | | | |
| | SSLSAWLFGG | | | | | | | | FDYWGQGTLVT | | | | | | | |
| | GTKLTVL | | | | | | | | VSS | | | | | | | |
| CD56 | DVVMTQSPLS | 977 | QIII | 978 | KVS | 979 | FQGS | 980 | QVQLVESGGGV | 981 | GFTF | 982 | ISSG | 983 | ARMR | 984 |
| | LPVTLGQPASI | | HSDG | | | | HVP | | VQPGRSLRLSCA | | SSFG | | SFTI | | KGYA | |
| | SCRSSQIIIHSD | | NTY | | | | HT | | ASGFTFSSFGMH | | | | | | MDY | |
| | GNTYLEWFQQ | | | | | | | | WVRQAPGKGLE | | | | | | | |
| | RPGQSPRRLIY | | | | | | | | WVAYISSGSFTIY | | | | | | | |
| | KVSNRFSGVP | | | | | | | | YADSVKGRFTIS | | | | | | | |
| | DRFSGSGSGT | | | | | | | | RDNSKNTLYLQ | | | | | | | |
| | DFTLKISRVEA | | | | | | | | MNSLRAEDTAV | | | | | | | |
| | EDVGVYYCFQ | | | | | | | | YYCARMRKGYA | | | | | | | |
| | GSHVPHTFGQ | | | | | | | | MDYWGQGTLVT | | | | | | | |
| | GTKVEIK | | | | | | | | VSS | | | | | | | |
| CD61 | EIVLTQSPATL | 985 | QSIS | 986 | YRS | 987 | QQS | 988 | QVQLVESGGGV | 989 | GFTF | 990 | VSSG | 991 | ARHL | 992 |
| (a4b3) | SLSPGERATLS | | NF | | | | GSW | | VQPGRSLRLSCA | | SSYD | | GGST | | HGSF | |
| | CQASQSISNFL | | | | | | PLT | | ASGFTFSSYDMS | | | | | | AS | |
| | HWYQQRPGQ | | | | | | | | WVRQAPGKGLE | | | | | | | |
| | APRLLIRYRSQ | | | | | | | | WVAKVSSGGGS | | | | | | | |
| | SISGIPARFSGS | | | | | | | | TYYLDTVQGRFT | | | | | | | |
| | GSGTDFTLTIS | | | | | | | | ISRDNSKNTLYL | | | | | | | |
| | SLEPEDFAVY | | | | | | | | QMNSLRAEDTA | | | | | | | |
| | YCQQSGSWPL | | | | | | | | VYYCARHLHGSF | | | | | | | |
| | TFGGGTKVEI | | | | | | | | ASWGQGTTVTVS | | | | | | | |
| | K | | | | | | | | S | | | | | | | |
| CD70 | QAVVTQEPSL | 993 | SGSV | 994 | NTN | 995 | ALFI | 996 | EVQLVESGGGLV | 997 | GFTF | 998 | INNE | 999 | ARDA | 1000 |
| | TVSPGGTVTL | | TSDN | | | | SNPS | | QPGGSLRLSCAA | | SVY | | GGTT | | GYSN | |
| | TCGLKSGSVT | | F | | | | VEFG | | SGFTFSVYYMN | | Y | | | | HVPI | |
| | SDNFPTWYQQ | | | | | | G | | WVRQAPGKGLE | | | | | | FDS | |
| | TPGQAPRLLIY | | | | | | | | WVSDINNEGGTT | | | | | | | |
| | NTNTRHSGVP | | | | | | | | YYADSVKGRFTI | | | | | | | |
| | DRFSGSILGNK | | | | | | | | SRDNSKNSLYLQ | | | | | | | |
| | AALTITGAQA | | | | | | | | MNSLRAEDTAV | | | | | | | |
| | DDEAEYFCAL | | | | | | | | YYCARDAGYSN | | | | | | | |
| | FISNPSVEFGG | | | | | | | | HVPIFDSWGQGT | | | | | | | |
| | GTQLTVL | | | | | | | | LVTVSS | | | | | | | |
| CD73 | QSVLTQPPSAS | 1001 | LSNI | 1002 | LDN | 1003 | ATW | 1004 | EVQLLESGGGLV | 1005 | GFTF | 1006 | ISGS | 1007 | ARLG | 1008 |
| (NT5E) | GTPGQRVTISC | | GRNP | | | | DDS | | QPGGSLRLSCAA | | SSYA | | GGRT | | YGRV | |
| | SGSLSNIGRNP | | | | | | HPG | | SGFTFSSYAYSW | | | | | | DE | |
| | VNWYQQLPG | | | | | | WT | | VRQAPGKGLEW | | | | | | | |
| | TAPKLLIYLDN | | | | | | | | VSAISGSGGRTY | | | | | | | |
| | LRLSGVPDRFS | | | | | | | | YADSVKGRFTIS | | | | | | | |
| | GSKSGTSASL | | | | | | | | RDNSKNTLYLQ | | | | | | | |
| | AISGLQSEDEA | | | | | | | | MNSLRAEDTAV | | | | | | | |
| | DYYCATWDD | | | | | | | | YYCARLGYGRV | | | | | | | |
| | SHPGWTFGGG | | | | | | | | DEWGRGTLVTVS | | | | | | | |
| | TKLTVL | | | | | | | | S | | | | | | | |
| CD74 | DIQLTQSPLSL | 1009 | QSLV | 1010 | TVS | 1011 | SQSS | 1012 | QVQLQQSGSELK | 1013 | GYTF | 1014 | INPN | 1015 | SRSR | 1016 |
| | PVTLGQPASIS | | HRNG | | | | HVPP | | KPGASVKVSCKA | | TNY | | TGEP | | GKNE | |
| | CRSSQSLVHR | | NTY | | | | T | | SGYTFTNYGVN | | G | | | | AWFA | |
| | NGNTYLHWF | | | | | | | | WIKQAPGQGLQ | | | | | | Y | |
| | QQRPGQSPRL | | | | | | | | WMGWINPNTGE | | | | | | | |
| | LIYTVSNRFSG | | | | | | | | PTFDDDFKGRFA | | | | | | | |
| | VPDRFSGSGS | | | | | | | | FSLDTSVSTAYL | | | | | | | |
| | GTDFTLKISRV | | | | | | | | QISSLKADDTAV | | | | | | | |
| | EAEDVGVYFC | | | | | | | | YFCSRSRGKNEA | | | | | | | |
| | SQSSHVPPTFG | | | | | | | | WFAYWGQGTLV | | | | | | | |
| | AGTRLEIK | | | | | | | | TVSS | | | | | | | |
| CEA | QTVLSQSPAIL | 1017 | SSVT | 1018 | ATS | 1019 | QHW | 1020 | EVKLVESGGGLV | 1021 | GFTF | 1022 | IGNK | 1023 | TRDR | 1024 |
| | SASPGEKVTM | | Y | | | | SSKP | | QPGGSLRLSCAT | | TDY | | ANGY | | GLRF | |
| | TCRASSSVTYI | | | | | | PT | | SGFTFTDYYMN | | Y | | TT | | YFDY | |
| | HWYQQKPGSS | | | | | | | | WVRQPPGKALE | | | | | | | |
| | PKSWIYATSN | | | | | | | | WLGFIGNKANGY | | | | | | | |
| | LASGVPARFS | | | | | | | | TTEYSASVKGRF | | | | | | | |
| | GSGSGTSYSLT | | | | | | | | TISRDKSQSILYL | | | | | | | |
| | ISRVEAEDAAT | | | | | | | | QMNTLRAEDSAT | | | | | | | |
| | YYCQHWSSKP | | | | | | | | YYCTRDRGLRFY | | | | | | | |
| | PTFGGGTKLEI | | | | | | | | FDYWGQGTTLT | | | | | | | |
| | K | | | | | | | | VSS | | | | | | | |
| CEA | DIQLTQSPSSL | 1025 | QDVG | 1026 | WTS | 1027 | QQY | 1028 | EVQLVESGGGVV | 1029 | GFDF | 1030 | IHPD | 1031 | ASLY | 1032 |
| | SASVGDRVTIT | | TS | | | | SLYR | | QPGRSLRLSCSAS | | TTY | | SSTI | | FGFP | |
| | CKASQDVGTS | | | | | | S | | GFDFTTYWMSW | | W | | | | WFAY | |
| | VAWYQQKPG | | | | | | | | VRQAPGKGLEWI | | | | | | | |
| | KAPKLLIYWT | | | | | | | | GEIHPDSSTINYA | | | | | | | |
| | STRHTGVPSRF | | | | | | | | PSLKDRFTISRDN | | | | | | | |
| | SGSGSGTDFTF | | | | | | | | AKNTLFLQMDSL | | | | | | | |
| | TISSLQPEDIAT | | | | | | | | RPEDTGVYFCAS | | | | | | | |
| | YYCQQYSLYR | | | | | | | | LYFGFPWFAYW | | | | | | | |
| | SFGQGTKVEIK | | | | | | | | GQGTPVTVSS | | | | | | | |
| Clau- | DIVMTQSPSSL | 1033 | QSLL | 1034 | WAS | 1035 | QND | 1036 | QVQLQQPGAELV | 1037 | GYTF | 1038 | IYPS | 1039 | TRSW | 1040 |
| din- | TVTAGEKVTM | | NSGN | | | | YSYP | | RPGASVKLSCKA | | TSY | | DSYT | | RGNS | |
| 18.2 | SCKSSQSLLNS | | QKNY | | | | FT | | SGYTFTSYWINW | | | | | | | |
| | GNQKNYLTW | | | | | | | | VKQRPGQGLEWI | | W | | | | FDY | |
| | YQQKPGQPPK | | | | | | | | GNIYPSDSYTNY | | | | | | | |
| | LLIYWASTRES | | | | | | | | NQKFKDKATLTV | | | | | | | |
| | GVPDRFTGSG | | | | | | | | DKSSSTAYMQLS | | | | | | | |
| | SGTDFTLTISS | | | | | | | | SPTSEDSAVYYC | | | | | | | |
| | VQAEDLAVYY | | | | | | | | TRSWRGNSFDY | | | | | | | |
| | CQNDYSYPFT | | | | | | | | WGQGTTLTVSS | | | | | | | |
| | FGSGTKLEIK | | | | | | | | | | | | | | | |
| cMET | DIQMTQSPSSL | 1041 | QSLL | 1042 | WAS | 1043 | QQY | 1044 | EVQLVESGGGLV | 1045 | GYTF | 1046 | IDPS | 1047 | ATYR | 1048 |
| | SASVGDRVTIT | | YTSS | | | | YAY | | QPGGSLRLSCAA | | TSY | | NSDT | | SYVT | |
| | CKSSQSLLYTS | | QKNY | | | | PWT | | SGYTFTSYWLH | | W | | | | PLDY | |
| | SQKNYLAWY | | | | | | | | WVRQAPGKGLE | | | | | | | |
| | QQKPGKAPKL | | | | | | | | WVGMIDPSNSDT | | | | | | | |
| | LIYWASTRES | | | | | | | | RFNPNFKDRFTIS | | | | | | | |
| | GVPSRFSGSGS | | | | | | | | ADTSKNTAYLQ | | | | | | | |
| | GTDFTLTISSL | | | | | | | | MNSLRAEDTAV | | | | | | | |
| | QPEDFATYYC | | | | | | | | YYCATYRSYVTP | | | | | | | |
| | QQYYAYPWTF | | | | | | | | LDYWGQGTLVT | | | | | | | |
| | GQGTKVEIK | | | | | | | | VSS | | | | | | | |
| CRLR | QSVLTQPPSVS | 1049 | SSNI | 1050 | DNN | 1051 | GTW | 1052 | QVQLVESGGGV | 1053 | GFTF | 1054 | ISFD | 1055 | ARDR | 1056 |
| | AAPGQKVTIS | | GNNY | | | | DSRL | | VQPGRSLRLSCA | | SSFG | | GSIK | | LNYY | |
| | CSGSSSNIGNN | | | | | | SAV | | ASGFTFSSFGMH | | | | | | DSSG | |
| | YVSWYQQLPG | | | | | | V | | WVRQAPGKGLE | | | | | | YYHY | |
| | TAPKLLIYDN | | | | | | | | WVAVISFDGSIK | | | | | | KYYG | |
| | NKRPSGIPDRF | | | | | | | | YSVDSVKGRFTIS | | | | | | MAV | |
| | SGSKSGTSTTL | | | | | | | | RDNSKNTLFLQM | | | | | | | |
| | GITGLQTGDE | | | | | | | | NSLRAEDTAVYY | | | | | | | |
| | ADYYCGTWD | | | | | | | | CARDRLNYYDSS | | | | | | | |
| | SRLSAVVFGG | | | | | | | | GYYHYKYYGMA | | | | | | | |
| | GTKLTVL | | | | | | | | VWGQGTTVTVSS | | | | | | | |
| Dabiga- | DVVMTQSPLS | 1057 | QSLL | 1058 | LVS | 1059 | LQST | 1060 | QVQLQESGPGLV | 1061 | GFSL | 1062 | IWAG | 1063 | ASAA | 1064 |
| tran | LPVTLGQPASI | | YTDG | | | | HFPH | | KPSETLSLTCTVS | | TSYI | | GST | | YYSY | |
| | SCKSSQSLLYT | | KTY | | | | T | | GFSLTSYIVDWIR | | | | | | YNYD | |
| | DGKTYLYWFL | | | | | | | | QPPGKGLEWIGV | | | | | | GFAY | |
| | QRPGQSPRRLI | | | | | | | | IWAGGSTGYNSA | | | | | | | |
| | YLVSKLDSGV | | | | | | | | LRSRVSITKDTSK | | | | | | | |
| | PDRFSGSGSGT | | | | | | | | NQFSLKLSSVTA | | | | | | | |
| | DFTLKISRVEA | | | | | | | | ADTAVYYCASA | | | | | | | |
| | EDVGVYYCLQ | | | | | | | | AYYSYYNYDGF | | | | | | | |
| | STHFPHTFGG | | | | | | | | AYWGQGTLVTV | | | | | | | |
| | GTKVEIK | | | | | | | | SS | | | | | | | |
| DLL3 | EIVMTQSPATL | 1065 | QSVS | 1066 | YAS | 1067 | QQD | 1068 | QVQLVQSGAEV | 1069 | GYTF | 1070 | INTY | 1071 | ARIG | 1072 |
| | SVSPGERATLS | | ND | | | | YTSP | | KKPGASVKVSCK | | TNY | | TGEP | | DSSP | |
| | CKASQSVSND | | | | | | WT | | ASGYTFTNYGM | | G | | | | SDY | |
| | VVWYQQKPG | | | | | | | | NWVRQAPGQGL | | | | | | | |
| | QAPRLLIYYAS | | | | | | | | EWMGWINTYTG | | | | | | | |
| | NRYTGIPARFS | | | | | | | | EPTYADDFKGRV | | | | | | | |
| | GSGSGTEFTLT | | | | | | | | TMTTDTSTSTAY | | | | | | | |
| | ISSLQSEDFAV | | | | | | | | MELRSLRSDDTA | | | | | | | |
| | YYCQQDYTSP | | | | | | | | VYYCARIGDSSPS | | | | | | | |
| | WTFGQGTKLE | | | | | | | | DYWGQGTLVTV | | | | | | | |
| | IK | | | | | | | | SS | | | | | | | |
| DLL4 | EIVLTQSPATL | 1073 | QSVS | 1074 | DAS | 1075 | QHRS | 1076 | QVQLVESGGGV | 1077 | GFTF | 1078 | LWYD | 1079 | ARDH | 1080 |
| | SLSPGERATLS | | SY | | | | NWP | | VQPGRSLRLSCA | | SSYG | | GTNK | | DFRS | |
| | CRASQSVSSY | | | | | | PT | | ASGFTFSSYGMH | | | | | | GYEG | |
| | LAWYQQKPG | | | | | | | | WVRQAPGKGLE | | | | | | WFDP | |
| | QAPRLLIYDAS | | | | | | | | WVSFLWYDGTN | | | | | | | |
| | NRATGIPARFS | | | | | | | | KNYVESVKGRFT | | | | | | | |
| | GSGSGTDFTLT | | | | | | | | ISRDNSKNMLYL | | | | | | | |
| | ISSLEPEDFAV | | | | | | | | EMNSLRAEDTAV | | | | | | | |
| | YYCQHRSNWP | | | | | | | | YYCARDHDFRSG | | | | | | | |
| | PTFGGGTKVEI | | | | | | | | YEGWFDPWGQG | | | | | | | |
| | K | | | | | | | | TLVTVSS | | | | | | | |
| DLL4 | DIVMTQSPDSL | 1081 | ESVD | 1082 | AAS | 1083 | QQS | 1084 | QVQLVQSGAEV | 1085 | GYSF | 1086 | ISSY | 1087 | ARDY | 1088 |
| | AVSLGERATIS | | NYGI | | | | KEVP | | KKPGASVKISCK | | TAY | | NGAT | | DYDV | |
| | CRASESVDNY | | SF | | | | WT | | ASGYSFTAYYIH | | Y | | | | GMDY | |
| | GISFMKWFQQ | | | | | | | | WVKQAPGQGLE | | | | | | | |
| | KPGQPPKLLIY | | | | | | | | WIGYISSYNGAT | | | | | | | |
| | AASNQGSGVP | | | | | | | | NYNQKFKGRVTF | | | | | | | |
| | DRFSGSGSGT | | | | | | | | TTDTSTSTAYME | | | | | | | |
| | DFTLTISSLQA | | | | | | | | LRSLRSDDTAVY | | | | | | | |
| | EDVAVYYCQ | | | | | | | | YCARDYDYDVG | | | | | | | |
| | QSKEVPWTFG | | | | | | | | MDYWGQGTLVT | | | | | | | |
| | GGTKVEIK | | | | | | | | VSS | | | | | | | |
| DNA/his | ENVLTQSPAI | 1089 | SSVS | 1090 | STS | 1091 | QQY | 1092 | QVQLKESGPGLV | 1093 | GFSL | 1094 | IWGG | 1095 | AKEK | 1096 |
| tone | MSASPGEKVT | | SSY | | | | SGYP | | APSQSLSITCTVS | | TDY | | GST | | RRGY | |
| (H1) | MTCRASSSVS | | | | | | LT | | GFSLTDYGVRWI | | G | | | | YYAM | |
| complex | SSYLHWYQQK | | | | | | | | RQPPGKGLEWLG | | | | | | DY | |
| | SGASPKLWIYS | | | | | | | | VIWGGGSTYYNS | | | | | | | |
| | TSNLASGVPA | | | | | | | | ALKSRLSISKDNS | | | | | | | |
| | RFSGSGSGTSY | | | | | | | | KSQVFLKMNSLQ | | | | | | | |
| | SLTISSVEAED | | | | | | | | TDDTAMYYCAK | | | | | | | |
| | AATYYCQQYS | | | | | | | | EKRRGYYYAMD | | | | | | | |
| | GYPLTFGGGT | | | | | | | | YWGQGTSVTVSS | | | | | | | |
| | KLEIK | | | | | | | | | | | | | | | |
| EGFR | DILLTQSPVILS | 1097 | QSIG | 1098 | YAS | 1099 | QQN | 1100 | QVQLKQSGPGLV | 1101 | GFSL | 1102 | IWSG | 1103 | ARAL | 1104 |
| | VSPGERVSFSC | | TN | | | | NNW | | QPSQSLSITCTVS | | TNY | | GNT | | TYYD | |
| | RASQSIGTNIH | | | | | | PTT | | GFSLTNYGVHW | | G | | | | YEFA | |
| | WYQQRTNGSP | | | | | | | | VRQSPGKGLEWL | | | | | | Y | |
| | RLLIKYASESIS | | | | | | | | GVIWSGGNTDYN | | | | | | | |
| | GIPSRFSGSGS | | | | | | | | TPFTSRLSINKDN | | | | | | | |
| | GTDFTLSINSV | | | | | | | | SKSQVFFKMNSL | | | | | | | |
| | ESEDIADYYC | | | | | | | | QSNDTAIYYCAR | | | | | | | |
| | QQNNNWPTTF | | | | | | | | ALTYYDYEFAY | | | | | | | |
| | GAGTKLELK | | | | | | | | WGQGTLVTVSA | | | | | | | |
| EGFR | DIQMTQSPSSL | 1105 | QDIS | 1106 | DAS | 1107 | QHF | 1108 | QVQLQESGPGLV | 1109 | GGS | 1110 | IYYS | 1111 | VRDR | 1112 |
| | SASVGDRVTIT | | NY | | | | DHLP | | KPSETLSLTCTVS | | VSSG | | GNT | | VTGA | |
| | CQASQDISNY | | | | | | LA | | GGSVSSGDYYW | | DYY | | | | FDI | |
| | LNWYQQKPG | | | | | | | | TWIRQSPGKGLE | | | | | | | |
| | KAPKLLIYDAS | | | | | | | | WIGHIYYSGNTN | | | | | | | |
| | NLETGVPSRFS | | | | | | | | YNPSLKSRLTISI | | | | | | | |
| | GSGSGTDFTFT | | | | | | | | DTSKTQFSLKLSS | | | | | | | |
| | ISSLQPEDIAT | | | | | | | | VTAADTAIYYCV | | | | | | | |
| | YFCQHFDHLP | | | | | | | | RDRVTGAFDIWG | | | | | | | |
| | LAFGGGTKVE | | | | | | | | QGTMVTVSS | | | | | | | |
| | IK | | | | | | | | | | | | | | | |
| EGFR | EIVMTQSPATL | 1113 | QSVS | 1114 | DAS | 1115 | HQY | 1116 | QVQLQESGPGLV | 1117 | GGSI | 1118 | IYYS | 1119 | ARVS | 1120 |
| | SLSPGERATLS | | SY | | | | GSTP | | KPSQTLSLTCTVS | | SSGD | | GST | | IFGV | |
| | CRASQSVSSY | | | | | | LT | | GGSISSGDYYWS | | YY | | | | GTFD | |
| | LAWYQQKPG | | | | | | | | WIRQPPGKGLEW | | | | | | Y | |
| | QAPRLLIYDAS | | | | | | | | IGYIYYSGSTDYN | | | | | | | |
| | NRATGIPARFS | | | | | | | | PSLKSRVTMSVD | | | | | | | |
| | GSGSGTDFTLT | | | | | | | | TSKNQFSLKVNS | | | | | | | |
| | ISSLEPEDFAV | | | | | | | | VTAADTAVYYC | | | | | | | |
| | YYCHQYGSTP | | | | | | | | ARVSIFGVGTFD | | | | | | | |
| | LTFGGGTKAEI | | | | | | | | YWGQGTLVTVSS | | | | | | | |
| | KR | | | | | | | | | | | | | | | |
| EGFR | DIQMTQSPSSL | 1121 | QNIV | 1122 | KVS | 1123 | FQYS | 1124 | QVQLQQSGAEV | 1125 | GYTF | 1126 | INPT | 1127 | ARQG | 1128 |
| | SASVGDRVTIT | | HSNG | | | | HVP | | KKPGSSVKVSCK | | TNY | | SGGS | | LWFD | |
| | CRSSQNIVHSN | | NTY | | | | WT | | ASGYTFTNYYIY | | Y | | | | SDGR | |
| | GNTYLDWYQ | | | | | | | | WVRQAPGQGLE | | | | | | GFDF | |
| | QTPGKAPKLLI | | | | | | | | WIGGINPTSGGSN | | | | | | W | |
| | YKVSNRFSGV | | | | | | | | FNEKFKTRVTITV | | | | | | | |
| | PSRFSGSGSGT | | | | | | | | DESTNTAYMELS | | | | | | | |
| | DFTFTISSLQPE | | | | | | | | SLRSEDTAFYFC | | | | | | | |
| | DIATYYCFQY | | | | | | | | ARQGLWFDSDG | | | | | | | |
| | SHVPWTFGQG | | | | | | | | RGFDFWGQGSTV | | | | | | | |
| | TKLQIT | | | | | | | | TVSS | | | | | | | |
| EGFR | IQLTQSPSSLS | 1129 | QDIS | 1130 | DAS | 1131 | QQF | 1132 | QVQLVESGGGV | 1133 | GFTF | 1134 | IWDD | 1135 | ARDG | 1136 |
| | ASVGDRVTIT | | SA | | | | NSYP | | VQPGRSLRLSCA | | STYG | | GSYK | | ITMV | |
| | CRASQDISSAL | | | | | | LT | | ASGFTFSTYGMH | | | | | | RGVM | |
| | VWYQQKPGK | | | | | | | | WVRQAPGKGLE | | | | | | KDYF | |
| | APKLLIYDASS | | | | | | | | WVAVIWDDGSY | | | | | | DY | |
| | LESGVPSARFS | | | | | | | | KYYGDSVKGRFT | | | | | | | |
| | GSESGTDFTLT | | | | | | | | ISRDNSKNTLYL | | | | | | | |
| | ISSLQPEDFAT | | | | | | | | QMNSLRAEDTA | | | | | | | |
| | YYCQQFNSYP | | | | | | | | VYYCARDGITMV | | | | | | | |
| | LTFGGGTKVEI | | | | | | | | RGVMKDYFDYW | | | | | | | |
| | K | | | | | | | | GQGTLVTVSS | | | | | | | |
| EGFR | DIQMTQSPSSL | 1137 | QDIN | 1138 | YTS | 1139 | LQY | 1140 | QVQLVQSGAEV | 1141 | GYTF | 1142 | IYPG | 1143 | ARYD | 1144 |
| | SASVGDRVTIT | | NY | | | | DNLL | | AKPGASVKLSCK | | TSY | | DGDT | | APGY | |
| | CRASQDINNY | | | | | | YT | | ASGYTFTSYWM | | W | | | | AMDY | |
| | LAWYQHKPG | | | | | | | | QWVKQRPGQGL | | | | | | | |
| | KGPKLLIHYTS | | | | | | | | ECIGTIYPGDGDT | | | | | | | |
| | TLHPGIPSRFS | | | | | | | | TYTQKFQGKATL | | | | | | | |
| | GSGSGRDYSF | | | | | | | | TADKSSSTAYMQ | | | | | | | |
| | SISSLEPEDIAT | | | | | | | | LSSLRSEDSAVY | | | | | | | |
| | YYCLQYDNLL | | | | | | | | YCARYDAPGYA | | | | | | | |
| | YTFGQGTKLEI | | | | | | | | MDYWGQGTLVT | | | | | | | |
| | K | | | | | | | | VSS | | | | | | | |
| EGFR | DIQMTQSPSSL | 1145 | SSVT | 1146 | DTS | 1147 | QQW | 1148 | QVQLVQSGAEV | 1149 | GYTF | 1150 | FNPS | 1151 | ASRD | 1152 |
| | SASVGDRVTIT | | Y | | | | SSHI | | KKPGASVKVSCK | | TSH | | NGRT | | YDYD | |
| | CSASSSVIYM | | | | | | FT | | ASGYTFTSHWM | | W | | | | GRYF | |
| | YWYQQKPGK | | | | | | | | HWVRQAPGQGL | | | | | | DY | |
| | APKLLIYDTSN | | | | | | | | EWIGEFNPSNGR | | | | | | | |
| | LASGVPSRFSG | | | | | | | | TNYNEKFKSKAT | | | | | | | |
| | SGSGTDYTFTI | | | | | | | | MTVDTSTNTAY | | | | | | | |
| | SSLQPEDIATY | | | | | | | | MELSSLRSEDTA | | | | | | | |
| | YCQQWSSHIF | | | | | | | | VYYCASRDYDY | | | | | | | |
| | TFGQGTKVEI | | | | | | | | DGRYFDYWGQG | | | | | | | |
| | K | | | | | | | | TLVTVSS | | | | | | | |
| EGFR | DIQMTQSPSSL | 1153 | QGIN | 1154 | NTN | 1155 | LQH | 1156 | QVQLVQSGAEV | 1157 | GFTF | 1158 | FNPN | 1159 | ARLS | 1160 |
| | SASVGDRVTIT | | NY | | | | NSFP | | KKPGSSVKVSCK | | TDY | | SGYS | | PGGY | |
| | CRASQGINNY | | | | | | T | | ASGFTFTDYKIH | | K | | | | YVMD | |
| | LNWYQQKPG | | | | | | | | WVRQAPGQGLE | | | | | | AW | |
| | KAPKRLIYNT | | | | | | | | WMGYFNPNSGY | | | | | | | |
| | NNLQTGVPSR | | | | | | | | STYAQKFQGRVT | | | | | | | |
| | FSGSGSGTEFT | | | | | | | | ITADKSTSTAYM | | | | | | | |
| | LTISSLQPEDF | | | | | | | | ELSSLRSEDTAV | | | | | | | |
| | ATYYCLQHNS | | | | | | | | YYCARLSPGGYY | | | | | | | |
| | FPTFGQGTKLE | | | | | | | | VMDAWGQGTTV | | | | | | | |
| | IK | | | | | | | | TVSS | | | | | | | |
| EGFR | DIQMTQSPSSL | 1161 | QNIA | 1162 | SAS | 1163 | QQSE | 1164 | EVQLVESGGGLV | 1165 | GFTL | 1166 | ISAA | 1167 | ARES | 1168 |
| HER3 | SASVGDRVTIT | | TD | | | | PEPY | | QPGGSLRLSCAA | | SGD | | GGYT | | RVSF | |
| | CRASQNIATD | | | | | | T | | SGFTLSGDWIHW | | W | | | | EAAM | |
| | VAWYQQKPG | | | | | | | | VRQAPGKGLEW | | | | | | DY | |
| | KAPKLLIYSAS | | | | | | | | VGEISAAGGYTD | | | | | | | |
| | FLYSGVPSRFS | | | | | | | | YADSVKGRFTIS | | | | | | | |
| | GSGSGTDFTLT | | | | | | | | ADTSKNTAYLQ | | | | | | | |
| | ISSLQPEDFAT | | | | | | | | MNSLRAEDTAV | | | | | | | |
| | YYCQQSEPEP | | | | | | | | YYCARESRVSFE | | | | | | | |
| | YTFGQGTKVE | | | | | | | | AAMDYWGQGTL | | | | | | | |
| | IK | | | | | | | | VTVSS | | | | | | | |
| EGFRvII | DILMTQSPSSM | 1169 | QDIN | 1170 | HGT | 1171 | VQY | 1172 | DVQLQESGPSLV | 1173 | GYSI | 1174 | ISYS | 1175 | VTAG | 1176 |
| I | SVSLGDTVSIT | | SN | | | | AQFP | | KPSQSLSLTCTVT | | TSDF | | GNT | | RGFP | |
| | CHSSQDINSNI | | | | | | WT | | GYSITSDFAWNW | | A | | | | Y | |
| | GWLQQRPGKS | | | | | | | | IRQFPGNKLEWM | | | | | | | |
| | FKGLIYHGTN | | | | | | | | GYISYSGNTRYN | | | | | | | |
| | LDDEVPSRFSG | | | | | | | | PSLKSRISITRDTS | | | | | | | |
| | SGSGADYSLTI | | | | | | | | KNQFFLQLNSVTI | | | | | | | |
| | SSLESEDFADY | | | | | | | | EDTATYYCVTAG | | | | | | | |
| | YCVQYAQFP | | | | | | | | RGFPYWGQGTL | | | | | | | |
| | WTFGGGTKLE | | | | | | | | VTVSS | | | | | | | |
| | IKA | | | | | | | | | | | | | | | |
| EGFRvII | DIQMTQSPSS | 1177 | QDIN | 1178 | HGT | 1179 | VQY | 1180 | QVQLQESGPGLV | 1181 | GYSI | 1182 | ISYS | 1183 | VTAG | 1184 |
| I | MSVSVGDRVT | | SN | | | | AQFP | | KPSQTLSLTCTVS | | SSDF | | GNT | | RGFP | |
| | ITCHSSQDINS | | | | | | WT | | GYSISSDFAWNW | | A | | | | Y | |
| | NIGWLQQKPG | | | | | | | | IRQPPGKGLEWM | | | | | | | |
| | KSFKGLIYHGT | | | | | | | | GYISYSGNTRYQ | | | | | | | |
| | NLDDGVPSRF | | | | | | | | PSLKSRITISRDTS | | | | | | | |
| | SGSGSGTDYT | | | | | | | | KNQFFLKLNSVT | | | | | | | |
| | LTISSLQPEDF | | | | | | | | AADTATYYCVT | | | | | | | |
| | ATYYCVQYA | | | | | | | | AGRGFPYWGQG | | | | | | | |
| | QFPWTFGGGT | | | | | | | | TLVTVSS | | | | | | | |
| | KLEIK | | | | | | | | | | | | | | | |
| EpCAM | ELVMTQSPSSL | 1185 | QSLL | 1186 | WAS | 1187 | QND | 1188 | EVQLLEQSGAEL | 1189 | ASG | 1190 | GDIH | 1191 | FCAR | 1192 |
| | TVTAGEKVTM | | NSGN | | | | YSYP | | VRPGTSVKISCK | | YAFT | | FPGS | | LRNW | |
| | SCKSSQSLLNS | | QKNY | | | | LT | | ASGYAFTNYWL | | N | | G | | DEPM | |
| | GNQKNYLTW | | | | | | | | GWVKQRPGHGL | | | | | | DY | |
| | YQQKPGQPPK | | | | | | | | EWIGDIHFPGSGN | | | | | | | |
| | LLIYWASTRES | | | | | | | | IHYNEKFKGKAT | | | | | | | |
| | GVPDRFTGSG | | | | | | | | LTADKSSSTAYM | | | | | | | |
| | SGTDFTLTISS | | | | | | | | QLSSLTFEDSAV | | | | | | | |
| | VQAEDLAVYY | | | | | | | | YFCARLRNWDEP | | | | | | | |
| | CQNDYSYPLT | | | | | | | | MDYWGQGTTVT | | | | | | | |
| | FGAGTKLEIK | | | | | | | | VSS | | | | | | | |
| EpCAM | ELQMTQSPSSL | 1193 | QSIS | 1194 | WAS | 1195 | QQS | 1196 | EVQLLESGGGVV | 1197 | GFTF | 1198 | ISYD | 1199 | AKDM | 1200 |
| | SASVGDRVTIT | | SY | | | | YDIP | | QPGRSLRLSCAA | | SSYG | | GSNK | | GWGS | |
| | CRTSQSISSYL | | | | | | YT | | SGFTFSSYGMHW | | | | | | GWRP | |
| | NWYQQKPGQ | | | | | | | | VRQAPGKGLEW | | | | | | YYYY | |
| | PPKLLIYWAST | | | | | | | | VAVISYDGSNKY | | | | | | GMDV | |
| | RESGVPDRFS | | | | | | | | YADSVKGRFTIS | | | | | | | |
| | GSGSGTDFTLT | | | | | | | | RDNSKNTLYLQ | | | | | | | |
| | ISSLQPEDSAT | | | | | | | | MNSLRAEDTAV | | | | | | | |
| | YYCQQSYDIP | | | | | | | | YYCAKDMGWGS | | | | | | | |
| | YTFGQGTKLEI | | | | | | | | GWRPYYYYGMD | | | | | | | |
| | K | | | | | | | | VWGQGTTVTVSS | | | | | | | |
| EpCAM | DIVLTQSPFSN | 1201 | KSLL | 1202 | QMS | 1203 | AQN | 1204 | QVKLQQSGPELK | 1205 | GYTF | 1206 | INTY | 1207 | ARFA | 1208 |
| | PVTLGTSASIS | | HSNG | | | | LEIP | | KPGETVKISCKAS | | TNY | | TGES | | IKGD | |
| | CRSTKSLLHSN | | ITY | | | | RT | | GYTFTNYGMNW | | G | | | | Y | |
| | GITYLYWYLQ | | | | | | | | VKQAPGKGLKW | | | | | | | |
| | KPGQSPQLLIY | | | | | | | | MGWINTYTGEST | | | | | | | |
| | QMSNLASGVP | | | | | | | | YADDFKGRFAFS | | | | | | | |
| | DRFSSSGSGTD | | | | | | | | LETSASAAYLQIN | | | | | | | |
| | FTLRISRVEAE | | | | | | | | NLKNEDTATYFC | | | | | | | |
| | DVGVYYCAQ | | | | | | | | ARFAIKGDYWG | | | | | | | |
| | NLEIPRTFGGG | | | | | | | | QGTTVTVSS | | | | | | | |
| | TKLEIK | | | | | | | | | | | | | | | |
| EpCAM | NIVMTQSPKS | 1209 | ENVV | 1210 | GAS | 1211 | GQG | 1212 | QVQLQQSGAELV | 1213 | GYA | 1214 | INPG | 1215 | ARDG | 1216 |
| | MSMSVGERVT | | TY | | | | YSYP | | RPGTSVKVSCKA | | FTNY | | SGGT | | PWFA | |
| | LTCKASENVV | | | | | | YT | | SGYAFTNYLIEW | | L | | | | Y | |
| | TYVSWYQQKP | | | | | | | | VKQRPGQGLEWI | | | | | | | |
| | EQSPKLLIYGA | | | | | | | | GVINPGSGGTNY | | | | | | | |
| | SNRYTGVPDR | | | | | | | | NEKFKGKATLTA | | | | | | | |
| | FTGSGSATDFT | | | | | | | | DKSSSTAYMQLS | | | | | | | |
| | LTISSVQAEDL | | | | | | | | SLTSDDSAVYFC | | | | | | | |
| | ADYHCGQGYS | | | | | | | | ARDGPWFAYWG | | | | | | | |
| | YPYTFGGGTK | | | | | | | | QGTLVTVSA | | | | | | | |
| | LEIK | | | | | | | | | | | | | | | |
| EpCAM | EIVMTQSPATL | 1217 | QSVS | 1218 | GAS | 1219 | QQY | 1220 | QVQLVQSGAEV | 1221 | SGGT | 1222 | GIIP | 1223 | CARG | 1224 |
| | SVSPGERATLS | | SN | | | | NNW | | KKPGSSVKVSCIC | | FSSY | | IFGT | | LLWN | |
| | CRASQSVSSN | | | | | | PPAY | | ASGGTFSSYAIS | | | | | | Y | |
| | LAWYQQKPG | | | | | | T | | WVRQAPGQGLE | | | | | | | |
| | QAPRLITYGAS | | | | | | | | WMGGIIPIFGTAN | | | | | | | |
| | TTASGIPARFS | | | | | | | | YAQKFQGRVTIT | | | | | | | |
| | ASGSGTDFTLT | | | | | | | | ADESTSTAYMEL | | | | | | | |
| | ISSLQSEDFAV | | | | | | | | SSLRSEDTAVYY | | | | | | | |
| | YYCQQYNNW | | | | | | | | CARGLLWNYWG | | | | | | | |
| | PPAYTFGQGT | | | | | | | | QGTLVTVSS | | | | | | | |
| | KLEIK | | | | | | | | | | | | | | | |
| EphA3 | DIQMTQSPSFL | 1225 | QGII | 1226 | AAS | 1227 | GQY | 1228 | QVQLVQSGAEV | 1229 | GYTF | 1230 | IYPG | 1231 | ARGG | 1232 |
| | SASVGDRVTIT | | SY | | | | ANY | | KKPGASVKVSCK | | TGY | | SGNT | | YYED | |
| | CRASQGIISYL | | | | | | PYT | | ASGYTFTGYWM | | W | | | | FDS | |
| | AWYQQKPEK | | | | | | | | NWVRQAPGQGL | | | | | | | |
| | APKRLIYAASS | | | | | | | | EWMGDIYPGSGN | | | | | | | |
| | LQSGVPSRFSG | | | | | | | | TNYDEKFQGRVT | | | | | | | |
| | SGSGTEFTLTI | | | | | | | | MTRDTSISTAYM | | | | | | | |
| | SSLQPEDFATY | | | | | | | | ELSRLRSDDTAV | | | | | | | |
| | YCGQYANYPY | | | | | | | | YYCARGGYYED | | | | | | | |
| | TFGQGTKLEIK | | | | | | | | FDSWGQGTTVTV | | | | | | | |
| | | | | | | | | | SS | | | | | | | |
| ERGT(G | DIQLTQTPLSL | 1233 | QSLV | 1234 | KVS | 1235 | SQST | 1236 | QVQLQQSGGGL | 1237 | GFTF | 1238 | IRNK | 1239 | SGGK | 1240 |
| alNAc) | PVSLGDQASIS | | HSNG | | | | HVPT | | VQPGGSMKIFCA | | SDA | | ANNH | | VRNA | |
| Tn | CRSSQSLVHS | | NTY | | | | | | ASGFTFSDAWM | | W | | ET | | Y | |
| Antigen | NGNTYLHWY | | | | | | | | DWVRQSPEKGLE | | | | | | | |
| | LQKPGQSPKL | | | | | | | | WVAEIRNKANN | | | | | | | |
| | LIYKVSNRFSG | | | | | | | | HETYYAESVKGR | | | | | | | |
| | VPDRFSGSGS | | | | | | | | FTITRDDSKSRMS | | | | | | | |
| | GTDFTLKISSV | | | | | | | | LQMNSLRAEDTG | | | | | | | |
| | EAEDLGVYFC | | | | | | | | IYYCSGGKVRNA | | | | | | | |
| | SQSTHVPTFG | | | | | | | | YWGQGTTVTVSS | | | | | | | |
| | GGTKLEIK | | | | | | | | | | | | | | | |
| FLT1 | EIVLTQSPGTL | 1241 | QSVS | 1242 | GAS | 1243 | QQY | 1244 | QAQVVESGGGV | 1245 | GFAF | 1246 | IWYD | 1247 | ARDH | 1248 |
| | SLSPGERATLS | | SSY | | | | GSSP | | VQSGRSLRLSCA | | SSYG | | GSNK | | YGSG | |
| | CRASQSVSSSY | | | | | | LT | | ASGFAFSSYGMH | | | | | | VHHY | |
| | LAWYQQKPG | | | | | | | | WVRQAPGKGLE | | | | | | FYYG | |
| | QAPRLLIYGAS | | | | | | | | WVAVIWYDGSN | | | | | | LDV | |
| | SRATGIPDRFS | | | | | | | | KYYADSVRGRFT | | | | | | | |
| | GSGSGTDFTLT | | | | | | | | ISRDNSENTLYLQ | | | | | | | |
| | ISRLEPEDFAV | | | | | | | | MNSLRAEDTAV | | | | | | | |
| | YYCQQYGSSP | | | | | | | | YYCARDHYGSG | | | | | | | |
| | LTFGGGTKVEI | | | | | | | | VHHYFYYGLDV | | | | | | | |
| | K | | | | | | | | WGQGTTVTVSS | | | | | | | |
| FOLR1 | DIQLTQSPSSL | 1249 | SSIS | 1250 | GTS | 1251 | QQW | 1252 | EVQLVESGGGVV | 1253 | GFTF | 1254 | ISSG | 1255 | ARHG | 1256 |
| | SASVGDRVTIT | | SNN | | | | SSYP | | QPGRSLRLSCSAS | | SGY | | GSYT | | DDPA | |
| | CSVSSSISSNN | | | | | | YMY | | GFTFSGYGLSWV | | G | | | | WFAY | |
| | LHWYQQKPG | | | | | | T | | RQAPGKGLEWV | | | | | | W | |
| | KAPKPWIYGT | | | | | | | | AMISSGGSYTYY | | | | | | | |
| | SNLASGVPSRF | | | | | | | | ADSVKGRFAISR | | | | | | | |
| | SGSGSGTDYT | | | | | | | | DNAKNTLFLQM | | | | | | | |
| | FTISSLQPEDIA | | | | | | | | DSLRPEDTGVYF | | | | | | | |
| | TYYCQQWSSY | | | | | | | | CARHGDDPAWF | | | | | | | |
| | PYMYTFGQGT | | | | | | | | AYWGQGTPVTV | | | | | | | |
| | KVEIK | | | | | | | | SS | | | | | | | |
| FOLR1 | DIVLTQSPLSL | 1257 | QSVS | 1258 | RAS | 1259 | QQSR | 1260 | QVQLVQSGAEV | 1261 | GYTF | 1262 | IHPY | 1263 | TRYD | 1264 |
| | AVSLGQPAIIS | | FAGT | | | | EYPY | | VKPGASVKISCK | | TGYF | | DGDT | | GSRA | |
| | CKASQSVSFA | | SL | | | | T | | ASGYTFTGYFMN | | | | | | MDY | |
| | GTSLMHWYH | | | | | | | | WVKQSPGQSLE | | | | | | | |
| | QKPGQQPRLLI | | | | | | | | WIGRIHPYDGDT | | | | | | | |
| | YRASNLEAGV | | | | | | | | FYNQKFQGKATL | | | | | | | |
| | PDRFSGSGSKT | | | | | | | | TVDKSSNTAHME | | | | | | | |
| | DFTLTISPVEA | | | | | | | | LLSLTSEDFAVY | | | | | | | |
| | EDAATYYCQQ | | | | | | | | YCTRYDGSRAM | | | | | | | |
| | SREYPYTFGG | | | | | | | | DYWGQGTTVTV | | | | | | | |
| | GTKLEIK | | | | | | | | SS | | | | | | | |
| frizzled | DIELTQPPSVS | 1265 | NIGS | 1266 | DKS | 1267 | QSY | 1268 | EVQLVESGGGLV | 1269 | GFTF | 1270 | ISGD | 1271 | ARNF | 1272 |
| family | VAPGQTARISC | | FY | | | | ANTL | | QPGGSLRLSCAA | | SHYT | | GSYT | | IKYV | |
| receptor | SGDNIGSFYV | | | | | | SLV | | SGFTFSHYTLSW | | | | | | FAN | |
| (FZD) | HWYQQKPGQ | | | | | | | | VRQAPGKGLEW | | | | | | | |
| | APVLVIYDKS | | | | | | | | VSVISGDGSYTY | | | | | | | |
| | NRPSGIPERFS | | | | | | | | YADSVKGRFTISS | | | | | | | |
| | GSNSGNTATL | | | | | | | | DNSKNTLYLQM | | | | | | | |
| | TISGTQAEDEA | | | | | | | | NSLRAEDTAVYY | | | | | | | |
| | DYYCQSYANT | | | | | | | | CARNFIKYVFAN | | | | | | | |
| | LSLVFGGGTK | | | | | | | | WGQGTLVTVSS | | | | | | | |
| | LTVLG | | | | | | | | | | | | | | | |
| Lewis Y | DVLMTQIPVS | 1273 | QIIV | 1274 | KVS | 1275 | FQGS | 1276 | EVNLVESGGGLV | 1277 | GFTF | 1278 | ISQG | 1279 | ARGL | 1280 |
| | LPVSLGDQASI | | HNNG | | | | HVPF | | QPGGSLKVSCVT | | SDY | | GDIT | | DDGA | |
| | SCRSSQIIVHN | | NTY | | | | T | | SGFTFSDYYMY | | Y | | | | WFAY | |
| | NGNTYLEWYL | | | | | | | | WVRQTPEKRLE | | | | | | | |
| | QKPGQSPQLLI | | | | | | | | WVAYISQGGDIT | | | | | | | |
| | YKVSNRFSGV | | | | | | | | DYPDTVKGRFTIS | | | | | | | |
| | PDRFSGSGSGT | | | | | | | | RDNAKNSLYLQ | | | | | | | |
| | DFTLKISRVEA | | | | | | | | MSRLKSEDTAM | | | | | | | |
| | EDLGVYYCFQ | | | | | | | | YYCARGLDDGA | | | | | | | |
| | GSHVPFTFGSG | | | | | | | | WFAYWGQGTLV | | | | | | | |
| | TKLEIK | | | | | | | | TVSV | | | | | | | |
| Lewis Y | DIQMTQSPSSL | 1281 | QRIV | 1282 | KVS | 1283 | FQGS | 1284 | EVQLVESGGGVV | 1285 | GFTF | 1286 | MSNV | 1287 | ARGT | 1288 |
| | SASVGDRVTIT | | HSNG | | | | HVPF | | QPGRSLRLSCSTS | | SDY | | GAIT | | RDGS | |
| | CRSSQRIVHSN | | NTY | | | | T | | GFTFSDYYMYW | | Y | | | | WFAY | |
| | GNTYLEWYQ | | | | | | | | VRQAPGKGLEW | | | | | | | |
| | QTPGKAPKLLI | | | | | | | | VAYMSNVGAITD | | | | | | | |
| | YKVSNRFSGV | | | | | | | | YPDTVKGRFTISR | | | | | | | |
| | PSRFSGSGSGT | | | | | | | | DNSKNTLFLQMD | | | | | | | |
| | DFTFTISSLQPE | | | | | | | | SLRPEDTGVYFC | | | | | | | |
| | DIATYYCFQG | | | | | | | | ARGTRDGSWFA | | | | | | | |
| | SHVPFTFGQG | | | | | | | | YWGQGTPVTVSS | | | | | | | |
| | TKLQIT | | | | | | | | | | | | | | | |
| Lewis X | DIVMTQAAFS | 1289 | KSLL | 1290 | QMS | 1291 | AQN | 1292 | EVKLLESGGGLV | 1293 | SGFD | 1294 | EINP | 1295 | CARE | 1296 |
| | NPVTLGTSASI | | YSNG | | | | LEVP | | QPGGSQKLSCAA | | FSGY | | DSST | | TGTR | |
| | SCRSSKSLLYS | | ITY | | | | WT | | SGFDFSGYWMS | | | | | | FDY | |
| | NGITYLYWYL | | | | | | | | WVRQAPGKGLE | | | | | | | |
| | QKPGQSPQLLI | | | | | | | | WIGEINPDSSTIN | | | | | | | |
| | YQMSNLASGV | | | | | | | | YTPSLKDKFIISR | | | | | | | |
| | PDRFSSSGSGT | | | | | | | | DNAKNTLYLQM | | | | | | | |
| | DFTLRISRVEA | | | | | | | | SKVRSEDTALYY | | | | | | | |
| | EDVGVYYCA | | | | | | | | CARETGTRFDYW | | | | | | | |
| | QNLEVPWTFG | | | | | | | | GQGTTLTVSS | | | | | | | |
| | GGTKLEIK | | | | | | | | | | | | | | | |
| GCGR | DIQMTQSPSSL | 1297 | QGIR | 1298 | AAS | 1299 | LQY | 1300 | EVQLVESGGGLV | 1301 | GFTF | 1302 | IQED | 1303 | AREP | 1304 |
| | SASVGDRVTIT | | ND | | | | NSNP | | QPGGSLRLSCAA | | SNYL | | GIEK | | SHYD | |
| | CRASQGIRND | | | | | | FT | | SGFTFSNYLMNW | | | | | | ILTG | |
| | LGWYQQKPG | | | | | | | | VRQAPGKGLEW | | | | | | YDYY | |
| | KAPKRLIYAA | | | | | | | | LANIQEDGIEKY | | | | | | YGMD | |
| | SSLQSGVPSRF | | | | | | | | YVDSVKGRFTIS | | | | | | V | |
| | SGSGSGTEFIL | | | | | | | | RDNAKNSLYLQ | | | | | | | |
| | TVSSLQPEDFA | | | | | | | | MNSLRAEDTAV | | | | | | | |
| | TYYCLQYNSN | | | | | | | | YYCAREPSHYDI | | | | | | | |
| | PFTFGPGTKV | | | | | | | | LTGYDYYYGMD | | | | | | | |
| | DIK | | | | | | | | VWGQGTTVTVSS | | | | | | | |
| GD2 | EIVMTQSPATL | 1305 | QSLV | 1306 | KVS | 1307 | SQST | 1308 | EVQLLQSGPELE | 1309 | GSSF | 1310 | IDPY | 1311 | VSGM | 1312 |
| | SVSPGERATLS | | HRNG | | | | HVPP | | KPGASVMISCKA | | TGY | | YGGT | | EY | |
| | CRSSQSLVHR | | NTY | | | | LT | | SGSSFTGYNMN | | N | | | | | |
| | NGNTYLHWY | | | | | | | | WVRQNIGKSLE | | | | | | | |
| | LQKPGQSPKL | | | | | | | | WIGAIDPYYGGT | | | | | | | |
| | LIHKVSNRFSG | | | | | | | | SYNQKFKGRATL | | | | | | | |
| | VPDRFSGSGS | | | | | | | | TVDKSSSTAYMH | | | | | | | |
| | GTDFTLKISRV | | | | | | | | LKSLTSEDSAVY | | | | | | | |
| | EAEDLGVYFC | | | | | | | | YCVSGMEYWGQ | | | | | | | |
| | SQSTHVPPLTF | | | | | | | | GTSVTVSS | | | | | | | |
| | GAGTKLELK | | | | | | | | | | | | | | | |
| GD2 | SIVMTQTPKFL | 1313 | QSVS | 1314 | SAS | 1315 | QQD | 1316 | QVQLKESGPGLV | 1317 | GFSV | 1318 | IWAG | 1319 | ASRG | 1320 |
| | LVSAGDRVTIT | | ND | | | | YSS | | APSQSLSITCTVS | | TNY | | GIT | | GHYG | |
| | CKASQSVSND | | | | | | | | GFSVTNYGVHW | | G | | | | YALD | |
| | VTWYQQKAG | | | | | | | | VRQPPGKGLEWL | | | | | | Y | |
| | QSPKLLIYSAS | | | | | | | | GVIWAGGITNYN | | | | | | | |
| | NRYSGVPDRF | | | | | | | | SAFMSRLSISKDN | | | | | | | |
| | TGSGYGTAFT | | | | | | | | SKSQVFLKMNSL | | | | | | | |
| | FTISTVQAEDL | | | | | | | | QIDDTAMYYCAS | | | | | | | |
| | AVYFCQQDYS | | | | | | | | RGGHYGYALDY | | | | | | | |
| | SFGGGTKLEIK | | | | | | | | WGQGTSVTVSS | | | | | | | |
| GD2 | EIVMTQTPATL | 1321 | QSVS | 1322 | SAS | 1323 | QQD | 1324 | QVQLVESGPGVV | 1325 | GFSV | 1326 | IWAG | 1327 | ASRG | 1328 |
| | SVSAGERVTIT | | ND | | | | YSS | | QPGRSLRISCAVS | | TNY | | GIT | | GHYG | |
| | CKASQSVSND | | | | | | | | GFSVTNYGVHW | | G | | | | YALD | |
| | VTWYQQKPG | | | | | | | | VRQPPGKGLEWL | | | | | | Y | |
| | QAPRLLIYSAS | | | | | | | | GVIWAGGITNYN | | | | | | | |
| | NRYSGVPARF | | | | | | | | SAFMSRLTISKDN | | | | | | | |
| | SGSGYGTEFTF | | | | | | | | SKNTVYLQMNSL | | | | | | | |
| | TISSVQSEDFA | | | | | | | | RAEDTAMYYCA | | | | | | | |
| | VYFCQQDYSS | | | | | | | | SRGGHYGYALD | | | | | | | |
| | FGQGTKLEIK | | | | | | | | YWGQGTLVTVSS | | | | | | | |
| GD2 o- | DVVMTQTPLS | 1329 | QSLL | 1330 | KVS | 1331 | SQST | 1332 | EVKLVESGGGLV | 1333 | KFTF | 1334 | IRNR | 1335 | ARVS | 1336 |
| acetyl | LPVSLGDQASI | | KNNG | | | | HIPY | | LPGDSLRLSCATS | | TDY | | ANGY | | NWAF | |
| | SCRSSQSLLKN | | NTF | | | | T | | KFTFTDYYMTW | | Y | | TT | | DY | |
| | NGNTFLHWYL | | | | | | | | VRQPPRKALEQL | | | | | | | |
| | QKSGQSPKLLI | | | | | | | | GFIRNRANGYTT | | | | | | | |
| | YKVSNRLSGV | | | | | | | | EYNPSVKGRFTIS | | | | | | | |
| | PDRFSGSGSGT | | | | | | | | RDNSQSILYLQM | | | | | | | |
| | YFTLKISRVEA | | | | | | | | NTLRTEDSATYY | | | | | | | |
| | EDLGVYFCSQ | | | | | | | | CARVSNWAFDY | | | | | | | |
| | STHIPYTFGGG | | | | | | | | WGQGTTLTVSS | | | | | | | |
| | TKLELK | | | | | | | | | | | | | | | |
| GD3 | DIQMTQITSSL | 1337 | GFTF | 1338 | ISSG | 1339 | TRG | 1340 | DVQLVESGGGLV | 1341 | QDIG | 1342 | YTS | 1343 | QQGK | 1344 |
| | SVSLGDRVIIS | | SNFG | | GSSI | | GTGT | | QPGGSRKLSCAA | | NF | | | | TLP | |
| | CRASQDIGNFL | | | | | | RSLY | | SGFTFSNFGMHW | | | | | | | |
| | NWYQQKPDG | | | | | | YFD | | VRQAPEKGLEW | | | | | | | |
| | SLKLLIYYTSR | | | | | | Y | | VAYISSGGSSINY | | | | | | | |
| | LQSGVPSRFSG | | | | | | | | ADTVKGRFTISR | | | | | | | |
| | WGSGTDYSLT | | | | | | | | DNPKNTLFLQMT | | | | | | | |
| | ISNLEEEDIATF | | | | | | | | SLRSEDTAIYYCT | | | | | | | |
| | FCQQGKTLPY | | | | | | | | RGGTGTRSLYYF | | | | | | | |
| | TFGGGTKLEIK | | | | | | | | DYWGQGATLIVS | | | | | | | |
| | | | | | | | | | S | | | | | | | |
| GD3 | DIQMTQTASS | 1345 | QDIS | 1346 | YSS | 1347 | HQY | 1348 | EVTLVESGGDFV | 1349 | GFAF | 1350 | ISSG | 1351 | TRVK | 1352 |
| | LPASLGDRVTI | | NY | | | | SKLP | | KPGGSLKVSCAA | | SHY | | GSGT | | LGTY | |
| | SCSASQDISNY | | | | | | WT | | SGFAFSHYAMSW | | A | | | | YFDS | |
| | LNWYQQKPD | | | | | | | | VRQTPAKRLEW | | | | | | | |
| | GTVKLLIFYSS | | | | | | | | VAYISSGGSGTY | | | | | | | |
| | NLHSGVPSRFS | | | | | | | | YSDSVKGRFTISR | | | | | | | |
| | GGGSGTDYSL | | | | | | | | DNAKNTLYLQM | | | | | | | |
| | TISNLEPEDIAT | | | | | | | | RSLRSEDSAMYF | | | | | | | |
| | YFCHQYSKLP | | | | | | | | CTRVKLGTYYFD | | | | | | | |
| | WTFGGGTKLE | | | | | | | | SWGQGTTLTVSS | | | | | | | |
| | IK | | | | | | | | | | | | | | | |
| GM1 | DIQMTQSPSSL | 1353 | QGIS | 1354 | AAS | 1355 | QQY | 1356 | EVQLVESGGGLV | 1357 | GFTF | 1358 | ISRS | 1359 | AGTV | 1360 |
| | SASVGDRVTIT | | SW | | | | NSYP | | QPGESLRLSCVA | | SRY | | GRDI | | TTYY | |
| | CRASQGISSW | | | | | | PT | | SGFTFSRYKMNW | | K | | | | YYFG | |
| | LAWYQQKPE | | | | | | | | VRQAPGKGLEW | | | | | | MDV | |
| | KAPKSLIYAAS | | | | | | | | VSYISRSGRDIYY | | | | | | | |
| | SLQSGVPSRFS | | | | | | | | ADSVKGRFTISR | | | | | | | |
| | GSGSGTDFTLT | | | | | | | | DNAKNSLYLQM | | | | | | | |
| | ISSLQPEDFAT | | | | | | | | NSLRDEDTAVYY | | | | | | | |
| | YYCQQYNSYP | | | | | | | | CAGTVTTYYYYF | | | | | | | |
| | PTFGGGTKVEI | | | | | | | | GMDVWGHGTTV | | | | | | | |
| | K | | | | | | | | TVSS | | | | | | | |
| GM1 | DIQMTQSPSSL | 1361 | QGIS | 1362 | AAS | 1363 | QQY | 1364 | EVQLVESGGGLY | 1365 | GFTF | 1366 | YISR | 1367 | CAGT | 1368 |
| fucosyl | SASVGDRVTIT | | W | | | | NSYP | | QPGESLRLSCVA | | SRYK | | SGRD | | VTTY | |
| | CRASQGISWL | | | | | | PT | | SGFTFSRYKMNW | | | | | | YYYF | |
| | AWYQQKPEK | | | | | | | | VRQAPGKGLLE | | | | | | GMDV | |
| | APKSLIYAASS | | | | | | | | WVSYISRSGRDIY | | | | | | | |
| | LQSGVPSRFSG | | | | | | | | YADSVKGRFTIS | | | | | | | |
| | SGSGTDFTLTI | | | | | | | | RDNAKNSLYLQ | | | | | | | |
| | SSLQPEDFATY | | | | | | | | MNSLRDEDTAV | | | | | | | |
| | YCQQYNSYPP | | | | | | | | YYCAGTVTTYY | | | | | | | |
| | TFGGGTKVEI | | | | | | | | YYFGMDVWGHG | | | | | | | |
| | K | | | | | | | | TTVTVSS | | | | | | | |
| GM1 | DIQMTQSPSSL | 1369 | QGIS | 1370 | AAS | 1371 | QQY | 1372 | EVQLVESGGGLV | 1373 | GFTF | 1374 | ISRS | 1375 | AGTV | 1376 |
| fucosyl | ASVGDRVTIT | | SW | | | | NSYP | | QPGESLRLSCVV | | SRY | | GRDI | | TTYY | |
| | CRASQGISSW | | | | | | PT | | SGFTFSRYKMNW | | K | | | | YYFG | |
| | LAWYQQKPE | | | | | | | | VRQAPGKGLEWI | | | | | | MDVW | |
| | KAPKSLIYAAS | | | | | | | | SYISRSGRDIYYA | | | | | | G | |
| | SLQSGVPSRFS | | | | | | | | DSVKGRFTISRD | | | | | | | |
| | GSGSGTDFTLT | | | | | | | | NAKNSLYLQMSS | | | | | | | |
| | ISCLQPEDFAT | | | | | | | | LRDEDTAVYYCA | | | | | | | |
| | YYCQQYNSYP | | | | | | | | GTVTTYYYYFG | | | | | | | |
| | PTFGGGTKVEI | | | | | | | | MDVWGLGITVT | | | | | | | |
| | K | | | | | | | | VSS | | | | | | | |
| GM1 | DIQMTQSPSSL | 1377 | QGIS | 1378 | AA | 1379 | QQY | 1380 | EVQLVESGGGSV | 1381 | GFTF | 1382 | ISRS | 1383 | AGTV | 1384 |
| fucosyl | SASVGDRVTIT | | SW | | | | NSYP | | QPGESLRLSCVA | | SRY | | GRDI | | TTYY | |
| | CRASQGISSW | | | | | | PT | | SGFTFSRYKMNW | | K | | | | YDFG | |
| | LAWYQQKPE | | | | | | | | VRQAPGKGLEW | | | | | | MDV | |
| | KAPKSLIYAAS | | | | | | | | VSYISRSGRDIYY | | | | | | | |
| | LQSGVPSRFSG | | | | | | | | ADSVKGRFTISR | | | | | | | |
| | SGSGTDFTLTI | | | | | | | | DNAKNSLYLQM | | | | | | | |
| | SSLQPEDFATY | | | | | | | | NSLRDEDTAVYY | | | | | | | |
| | YCQQYNSYPP | | | | | | | | CAGTVTTYYYDF | | | | | | | |
| | TFGGGTKVEI | | | | | | | | GMDVWGQGTTV | | | | | | | |
| | K | | | | | | | | TVSS | | | | | | | |
| GM2 | QIVLTQSPAIM | 1385 | SSVS | 1386 | STS | 1387 | QQRS | 1388 | EVQLQQSGPELV | 1389 | GYTF | 1390 | IYPN | 1391 | ATYG | 1392 |
| | SASPGEKVTIT | | Y | | | | SYPY | | KPGASVKISCKA | | TDY | | NGGT | | HYYG | |
| | CSASSSVSYM | | | | | | T | | SGYTFTDYNMD | | N | | | | YMFA | |
| | HWFQQKPGTS | | | | | | | | WVKQSHGKSLE | | | | | | Y | |
| | PKLWIYSTSNL | | | | | | | | WIGYIYPNNGGT | | | | | | | |
| | ASGVPARFSG | | | | | | | | GYNQKFKSKATL | | | | | | | |
| | SGSGTSYSLTI | | | | | | | | TVDKSSSTAYME | | | | | | | |
| | SRMEAEDAAT | | | | | | | | LHSLTSEDSAVY | | | | | | | |
| | YYCQQRSSYP | | | | | | | | YCATYGHYYGY | | | | | | | |
| | YTFGGGTKLEI | | | | | | | | MFAYWGQGTLV | | | | | | | |
| | K | | | | | | | | TVSA | | | | | | | |
| GPA33 | DIVMTQSQKF | 1393 | QNVR | 1394 | LAS | 1395 | LQH | 1396 | EVKLVESGGGLV | 1397 | GFAF | 1398 | ISSG | 1399 | APTT | 1400 |
| | MSTSVGDRVS | | TV | | | | WSY | | KPGGSLKLSCAA | | STYD | | GSYT | | VVPF | |
| | ITCKASQNVR | | | | | | PLT | | SGFAFSTYDMSW | | | | | | AY | |
| | TVVAWYQQK | | | | | | | | VRQTPEKRLEWV | | | | | | | |
| | PGQSPKTLIYL | | | | | | | | ATISSGGSYTYYL | | | | | | | |
| | ASNRHTGVPD | | | | | | | | DSVKGRFTISRDS | | | | | | | |
| | RFTGSGSGTDF | | | | | | | | ARNTLYLQMSSL | | | | | | | |
| | TLTISNVQSED | | | | | | | | RSEDTALYYCAP | | | | | | | |
| | LADYFCLQHW | | | | | | | | TTVVPFAYWGQ | | | | | | | |
| | SYPLTFGSGTK | | | | | | | | GTLVTVSA | | | | | | | |
| | LEVK | | | | | | | | | | | | | | | |
| GPNMB | EIVMTQSPATL | 1401 | QSVD | 1402 | GAS | 1403 | QQY | 1404 | QVQLQESGPGLV | 1405 | GGSI | 1406 | IYYS | 1407 | ARGY | 1408 |
| | SVSPGERATLS | | NN | | | | NNW | | KPSQTLSLTCTVS | | SSFN | | GST | | NWNY | |
| | CRASQSVDNN | | | | | | PPWT | | GGSISSFNYYWS | | YY | | | | FDY | |
| | LVWYQQKPG | | | | | | | | WIRHHPGKGLE | | | | | | | |
| | QAPRLLIYGAS | | | | | | | | WIGYIYYSGSTYS | | | | | | | |
| | TRATGIPARFS | | | | | | | | NPSLKSRVTISVD | | | | | | | |
| | GSGSGTEFTLT | | | | | | | | TSKNQFSLTLSSV | | | | | | | |
| | ISSLQSEDFAV | | | | | | | | TAADTAVYYCA | | | | | | | |
| | YYCQQYNNW | | | | | | | | RGYNWNYFDYW | | | | | | | |
| | PPWTFGQGTK | | | | | | | | GQGTLVTVSS | | | | | | | |
| | VEIK | | | | | | | | | | | | | | | |
| GUCY2 | EIVMTQSPATL | 1409 | QSVS | 1410 | GAS | 1411 | QQY | 1412 | QVQLQQWGAGL | 1413 | GGSF | 1414 | INHR | 1415 | ARER | 1416 |
| C | SVSPGERATLS | | RN | | | | KTW | | LKPSETLSLTCAV | | SGY | | GNT | | GYTY | |
| | CRASQSVSRN | | | | | | PRT | | FGGSFSGYYWS | | Y | | | | GNFD | |
| | LAWYQQKPG | | | | | | | | WIRQPPGKGLEW | | | | | | H | |
| | QAPRLLIYGAS | | | | | | | | IGEINHRGNTND | | | | | | | |
| | TRATGIPARFS | | | | | | | | NPSLKSRVTISVD | | | | | | | |
| | GSGSGTEFTLT | | | | | | | | TSKNQFALKLSS | | | | | | | |
| | IGSLQSEDFAV | | | | | | | | VTAADTAVYYC | | | | | | | |
| | YYCQQYKTW | | | | | | | | ARERGYTYGNFD | | | | | | | |
| | PRTFGQGTNV | | | | | | | | HWGQGTLVTVSS | | | | | | | |
| | EIK | | | | | | | | | | | | | | | |
| HER2 | DIQMTQSPSSL | 1417 | QDVN | 1418 | SAS | 1419 | QQA | 1420 | EVQLVESGGGLV | 1421 | GFNI | 1422 | IYPT | 1423 | SRWG | 1424 |
| | SASVGDRVTIT | | TA | | | | YTTP | | QPGGSLRLSCAA | | KDT | | NGYT | | GDGF | |
| | CRASQDVNTA | | | | | | PT | | SGFNIKDTYIHW | | Y | | | | YAMD | |
| | VAWYQQKPG | | | | | | | | VRQAPGKGLEW | | | | | | Y | |
| | KAPKLLIYSAS | | | | | | | | VARIYPTNGYTR | | | | | | | |
| | FLYSGVPSRFS | | | | | | | | YADSVKGRFTIS | | | | | | | |
| | GSRSGTDFTLT | | | | | | | | ADTSKNTAYLQ | | | | | | | |
| | ISSLQPEDFAT | | | | | | | | MNSLRAEDTAV | | | | | | | |
| | YYCQQAYTTP | | | | | | | | YYCSRWGGDGF | | | | | | | |
| | PTFGQGTKVEI | | | | | | | | YAMDYWGQGTL | | | | | | | |
| | K | | | | | | | | VTVSS | | | | | | | |
| HER2 | DIQMTQSPSSL | 1425 | QDVN | 1426 | SAS | 1427 | QQH | 1428 | EVQLVESGGGLV | 1429 | GFNI | 1430 | IYPT | 1431 | SRWG | 1432 |
| | SASVGDRVTIT | | TA | | | | YTTP | | QPGGSLRLSCAA | KDT | | NGYT | | GDGF | | |
| | CRASQDVNTA | | | | | | PT | | SGFNIKDTYIHW | | Y | | | | YAMD | |
| | VAWYQQKPG | | | | | | | | VRQAPGKGLEW | | | | | | Y | |
| | KAPKLLIYSAS | | | | | | | | VARIYPTNGYTR | | | | | | | |
| | FLYSGVPSRFS | | | | | | | | YADSVKGRFTIS | | | | | | | |
| | GSRSGTDFTLT | | | | | | | | ADTSKNTAYLQ | | | | | | | |
| | ISSLQPEDFAT | | | | | | | | MNSLRAEDTAV | | | | | | | |
| | YYCQQHYTTP | | | | | | | | YYCSRWGGDGF | | | | | | | |
| | PTFGQGTKVEI | | | | | | | | YAMDYWGQGTL | | | | | | | |
| | K | | | | | | | | VTVSS | | | | | | | |
| HER2 | DIQMTQSPSSL | 1433 | QDVS | 1434 | SAS | 1435 | QQY | 1436 | EVQLVESGGGLV | 1437 | GFTF | 1438 | VNPN | 1439 | ARNL | 1440 |
| | SASVGDRVTIT | | IG | | | | YIYP | | QPGGSLRLSCAA | | TDY | | SGGS | | GPSF | |
| | CKASQDVSIG | | | | | | YT | | SGFTFTDYTMDW | | T | | | | YFDY | |
| | VAWYQQKPG | | | | | | | | VRQAPGKGLEW | | | | | | W | |
| | KAPKLLIYSAS | | | | | | | | VADVNPNSGGSI | | | | | | | |
| | YRYTGVPSRF | | | | | | | | YNQRFKGRFTLS | | | | | | | |
| | SGSGSGTDFTL | | | | | | | | VDRSKNTLYLQ | | | | | | | |
| | TISSLQPEDFA | | | | | | | | MNSLRAEDTAV | | | | | | | |
| | TYYCQQYYIY | | | | | | | | YYCARNLGPSFY | | | | | | | |
| | PYTFGQGTKV | | | | | | | | FDYWGQGTLVT | | | | | | | |
| | EIK | | | | | | | | VSS | | | | | | | |
| HER2 | QSVLTQPPSVS | 1441 | SSNI | 1442 | GNT | 1443 | QSY | 1444 | QVQLVESGGGLV | 1445 | GFTF | 1446 | ISGR | 1447 | AKMT | 1448 |
| | GAPGQRVTISC | | GAGY | | | | DSSL | | QPGGSLRLSCAA | | RSY | | GDNT | | SNAF | |
| | TGSSSNIGAGY | | G | | | | SGW | | SGFTFRSYAMSW | | A | | | | AFDY | |
| | GVHWYQQLP | | | | | | V | | VRQAPGKGLEW | | | | | | | |
| | GTAPKLLIYG | | | | | | | | VSAISGRGDNTY | | | | | | | |
| | NTNRPSGVPD | | | | | | | | YADSVKGRFTIS | | | | | | | |
| | RFSGFKSGTSA | | | | | | | | RDNSKNTLYLQ | | | | | | | |
| | SLAITGLQAED | | | | | | | | MNSLRAEDTAV | | | | | | | |
| | EADYYCQSYD | | | | | | | | YYCAKMTSNAF | | | | | | | |
| | SSLSGWVFGG | | | | | | | | AFDYWGQGTLV | | | | | | | |
| | GTKLTVL | | | | | | | | TVSS | | | | | | | |
| HER3 | QSALTQPASV | 1449 | SSDV | 1450 | EVS | 1451 | CSYA | 1452 | EVQLLESGGGLV | 1453 | GFTF | 1454 | ISSS | 1455 | TRGL | 1456 |
| | SGSPGQSITISC | | GSYN | | | | GSSI | | QPGGSLRLSCAA | | SHY | | GGWT | | KMAT | |
| | TGTSSDVGSY | | V | | | | FVI | | SGFTFSHYVMA | | V | | | | IFDY | |
| | NVVSWYQQH | | | | | | | | WVRQAPGKGLE | | | | | | | |
| | PGKAPKLIIYE | | | | | | | | WVSSISSSGGWT | | | | | | | |
| | VSQRPSGVSN | | | | | | | | LYADSVKGRFTIS | | | | | | | |
| | RFSGSKSGNT | | | | | | | | RDNSKNTLYLQ | | | | | | | |
| | ASLTISGLQTE | | | | | | | | MNSLRAEDTAV | | | | | | | |
| | DEADYYCCSY | | | | | | | | YYCTRGLKMATI | | | | | | | |
| | AGSSIFVIFGG | | | | | | | | FDYWGQGTLVT | | | | | | | |
| | GTKVTVL | | | | | | | | VSS | | | | | | | |
| HER3 | DIQMTQSPSSL | 1457 | QGIS | 1458 | GAS | 1459 | QQY | 1460 | EVQLLESGGGLV | 1461 | GFTF | 1462 | INSQ | 1463 | ARWG | 1464 |
| | SASVGDRVTIT | | NW | | | | SSFP | | QPGGSLRLSCAA | | SSYA | | GKST | | DEGF | |
| | CRASQGISNW | | | | | | TT | | SGFTFSSYAMSW | | | | | | DI | |
| | LAWYQQKPG | | | | | | | | VRQAPGKGLEW | | | | | | | |
| | KAPKLLIYGAS | | | | | | | | VSAINSQGKSTY | | | | | | | |
| | SLQSGVPSRFS | | | | | | | | YADSVKGRFTIS | | | | | | | |
| | GSGSGTDFTLT | | | | | | | | RDNSKNTLYLQ | | | | | | | |
| | ISSLQPEDFAT | | | | | | | | MNSLRAEDTAV | | | | | | | |
| | YYCQQYSSFP | | | | | | | | YYCARWGDEGF | | | | | | | |
| | TTFGQGTKVEI | | | | | | | | DIWGQGTLVTVS | | | | | | | |
| | K | | | | | | | | S | | | | | | | |
| HER3 | DIEMTQSPDSL | 1465 | QSVL | 1466 | WAS | 1467 | QQY | 1468 | QVQLQQWGAGL | 1469 | GGSF | 1470 | INHS | 1471 | ARDK | 1472 |
| | AVSLGERATIN | | YSSS | | | | YSTP | | LKPSETLSLTCAV | | SGY | | GST | | WTWY | |
| | CRSSQSVLYSS | | NRNY | | | | RT | | YGGSFSGYYWS | | Y | | | | FDL | |
| | SNRNYLAWY | | | | | | | | WIRQPPGKGLEW | | | | | | | |
| | QQNPGQPPKL | | | | | | | | IGEINHSGSTNYN | | | | | | | |
| | LIYWASTRES | | | | | | | | PSLKSRVTISVET | | | | | | | |
| | GVPDRFSGSG | | | | | | | | SKNQFSLKLSSVT | | | | | | | |
| | SGTDFTLTISS | | | | | | | | AADTAVYYCAR | | | | | | | |
| | LQAEDVAVYY | | | | | | | | DKWTWYFDLWG | | | | | | | |
| | CQQYYSTPRT | | | | | | | | RGTLVTVSS | | | | | | | |
| | FGQGTKVEIK | | | | | | | | | | | | | | | |
| HER3 | DIVMTQSPDSL | 1473 | QSVL | 1474 | WAS | 1475 | QSD | 1476 | QVQLVQSGAEV | 1477 | GYTF | 1478 | IYAG | 1479 | ARHR | 1480 |
| | AVSLGERATIN | | NSGN | | | | YSYP | | KKPGASVKVSCK | | RSSY | | TGSP | | DYYS | |
| | CKSSQSVLNS | | QKNY | | | | YT | | ASGYTFRSSYISW | | | | | | NSLT | |
| | GNQKNYLTW | | | | | | | | VRQAPGQGLEW | | | | | | Y | |
| | YQQKPGQPPK | | | | | | | | MGWIYAGTGSPS | | | | | | | |
| | LLIYWASTRES | | | | | | | | YNQKLQGRVTM | | | | | | | |
| | GVPDRFSGSG | | | | | | | | TTDTSTSTAYME | | | | | | | |
| | SGTDFTLTISS | | | | | | | | LRSLRSDDTAVY | | | | | | | |
| | LQAEDVAVYY | | | | | | | | YCARHRDYYSNS | | | | | | | |
| | CQSDYSYPYT | | | | | | | | LTYWGQGTLVT | | | | | | | |
| | FGQGTKLEIK | | | | | | | | VSS | | | | | | | |
| HER3 | YELTQDPAVS | 1481 | SLRS | 1482 | GKN | 1483 | NSRD | 1484 | QVQLVQSGGGL | 1485 | GFTF | 1486 | ISWD | 1487 | ARDL | 1488 |
| | VALGQTVRIT | | YY | | | | SPGN | | VQPGGSLRLSCA | | DDY | | SGST | | GAYQ | |
| | CQGDSLRSYY | | | | | | QWV | | ASGFTFDDYAMH | | A | | | | WVEG | |
| | ASWYQQKPG | | | | | | | | WVRQAPGKGLE | | | | | | FDY | |
| | QAPVLVIYGK | | | | | | | | WVAGISWDSGST | | | | | | | |
| | NNRPSGIPDRF | | | | | | | | GYADSVKGRFTI | | | | | | | |
| | SGSTSGNSASL | | | | | | | | SRDNAKNSLYLQ | | | | | | | |
| | TITGAQAEDE | | | | | | | | MNSLRAEDTALY | | | | | | | |
| | ADYYCNSRDS | | | | | | | | YCARDLGAYQW | | | | | | | |
| | PGNQWVFGG | | | | | | | | VEGFDYWGQGT | | | | | | | |
| | GTKVTVL | | | | | | | | LVTVSS | | | | | | | |
| HGFR | DIVMTQSPDSL | 1489 | ESVD | 1490 | RAS | 1491 | QQS | 1492 | QVQLVQSGAEV | 1493 | GYIF | 1494 | IKPN | 1495 | ARSE | 1496 |
| (cMET) | AVSLGERATIN | | SYAN | | | | KEDP | | KKPGASVKVSCK | | TAY | | NGLA | | ITTE | |
| | CKSSESVDSY | | SF | | | | LT | | ASGYIFTAYTMH | | T | | | | FDY | |
| | ANSFLHWYQQ | | | | | | | | WVRQAPGQGLE | | | | | | | |
| | KPGQPPKLLIY | | | | | | | | WMGWIKPNNGL | | | | | | | |
| | RASTRESGVP | | | | | | | | ANYAQKFQGRV | | | | | | | |
| | DRFSGSGSGT | | | | | | | | TMTRDTSISTAY | | | | | | | |
| | DFTLTISSLQA | | | | | | | | MELSRLRSDDTA | | | | | | | |
| | EDVAVYYCQ | | | | | | | | VYYCARSEITTEF | | | | | | | |
| | QSKEDPLTFG | | | | | | | | DYWGQGTLVTV | | | | | | | |
| | GGTKVEIK | | | | | | | | SS | | | | | | | |
| HGFR | DIQMTQSPSSL | 1497 | SSVS | 1498 | STS | 1499 | QVY | 1500 | QVQLVQSGAEV | 1501 | GYTF | 1502 | VNPN | 1503 | ARAN | 1504 |
| (cMET) | SASVGDRVTIT | | SIY | | | | SGYP | | KKPGASVKVSCK | | TDY | | RRGT | | WLDY | |
| | CSVSSSVSSIY | | | | | | LT | | ASGYTFTDYYM | | Y | | | | | |
| | LHWYQQKPG | | | | | | | | HWVRQAPGQGL | | | | | | | |
| | KAPKLLIYSTS | | | | | | | | EWMGRVNPNRR | | | | | | | |
| | NLASGVPSRFS | | | | | | | | GTTYNQKFEGRV | | | | | | | |
| | GSGSGTDFTLT | | | | | | | | TMTTDTSTSTAY | | | | | | | |
| | ISSLQPEDFAT | | | | | | | | MELRSLRSDDTA | | | | | | | |
| | YYCQVYSGYP | | | | | | | | VYYCARANWLD | | | | | | | |
| | LTFGGGTKVEI | | | | | | | | YWGQGTTVTVSS | | | | | | | |
| | K | | | | | | | | | | | | | | | |
| IgHe | DIQLTQSPSSL | 1505 | QSVD | 1506 | AAS | 1507 | QQS | 1508 | EVQLVESGGGLV | 1509 | GYSI | 1510 | ITYD | 1511 | ARGS | 1512 |
| | SASVGDRVTIT | | YDGD | | | | HEDP | | QPGGSLRLSCAV | | TSGY | | GST | | HYFG | |
| | CRASQSVDYD | | SY | | | | YT | | SGYSITSGYSWN | | S | | | | HWHF | |
| | GDSYMNWYQ | | | | | | | | WIRQAPGKGLE | | | | | | AV | |
| | QKPGKAPKLLI | | | | | | | | WVASITYDGSTN | | | | | | | |
| | YAASYLESGV | | | | | | | | YNPSVKGRITISR | | | | | | | |
| | PSRFSGSGSGT | | | | | | | | DDSKNTFYLQM | | | | | | | |
| | DFTLTISSLQP | | | | | | | | NSLRAEDTAVYY | | | | | | | |
| | EDFATYYCQQ | | | | | | | | CARGSHYFGHW | | | | | | | |
| | SHEDPYTFGQ | | | | | | | | HFAVWGQGTLV | | | | | | | |
| | GTKVEIK | | | | | | | | TVSS | | | | | | | |
| IgHe | EIVMTQSPATL | 1513 | QSIG | 1514 | YAS | 1515 | QQS | 1516 | QVQLVQSGAEV | 1517 | GYTF | 1518 | IDPG | 1519 | ARFS | 1520 |
| | SVSPGERATLS | | TN | | | | WSW | | MKPGSSVKVSCK | | SWY | | TFTT | | HFSG | |
| | CRASQSIGTNI | | | | | | PTT | | ASGYTFSWYWL | | W | | | | SNYD | |
| | HWYQQKPGQ | | | | | | | | EWVRQAPGHGL | | | | | | YFDY | |
| | APRLLIYYASE | | | | | | | | EWMGEIDPGTFT | | | | | | W | |
| | SISGIPARFSGS | | | | | | | | TNYNEKFKARVT | | | | | | | |
| | GSGTEFTLTIS | | | | | | | | FTADTSTSTAYM | | | | | | | |
| | SLQSEDFAVY | | | | | | | | ELSSLRSEDTAV | | | | | | | |
| | YCQQSWSWPT | | | | | | | | YYCARFSHFSGS | | | | | | | |
| | TFGGGTKVEI | | | | | | | | NYDYFDYWGQG | | | | | | | |
| | K | | | | | | | | TLVTVSS | | | | | | | |
| IGLF2 | QSVLTQPPSVS | 1521 | SSNI | 1522 | DNN | 1523 | ETW | 1524 | QVQLVQSGAEV | 1525 | GYTF | 1526 | MNPN | 1527 | ARDP | 1528 |
| | AAPGQKVTIS | | ENNH | | | | DTSL | | KKPGASVKVSCK | | TSYD | | SGNT | | YYYY | |
| | CSGSSSNIENN | | | | | | SAGR | | ASGYTFTSYDIN | | | | | | YGMD | |
| | HVSWYQQLPG | | | | | | V | | WVRQATGQGLE | | | | | | V | |
| | TAPKLLIYDN | | | | | | | | WMGWMNPNSG | | | | | | | |
| | NKRPSGIPDRF | | | | | | | | NTGYAQKFQGR | | | | | | | |
| | SGSKSGTSATL | | | | | | | | VTMTRNTSISTA | | | | | | | |
| | GITGLQTGDE | | | | | | | | YMELSSLRSEDT | | | | | | | |
| | ADYYCETWD | | | | | | | | AVYYCARDPYY | | | | | | | |
| | TSLSAGRVFG | | | | | | | | YYYGMDVWGQ | | | | | | | |
| | GGTKLTVL | | | | | | | | GTTVTVSS | | | | | | | |
| Kalli- | DIQMTQSPSTL | 1529 | QSIS | 1530 | KAS | 1531 | QQY | 1532 | EVQLLESGGGLV | 1533 | GFTF | 1534 | IYSS | 1535 | AYRR | 1536 |
| kreins | SASVGDRVTIT | | SW | | | | NTY | | QPGGSLRLSCAA | | SHYI | | GGIT | | IGVP | |
| | CRASQSISSWL | | | | | | WT | | SGFTFSHYIMMW | | | | | | RRDE | |
| | AWYQQKPGK | | | | | | | | VRQAPGKGLEW | | | | | | FDI | |
| | APKLLIYKAST | | | | | | | | VSGIYSSGGITVY | | | | | | | |
| | LESGVPSRFSG | | | | | | | | ADSVKGRFTISR | | | | | | | |
| | SGSGTEFTLTI | | | | | | | | DNSKNTLYLQM | | | | | | | |
| | SSLQPDDFAT | | | | | | | | NSLRAEDTAVYY | | | | | | | |
| | YYCQQYNTY | | | | | | | | CAYRRIGVPRRD | | | | | | | |
| | WTFGQGTKVE | | | | | | | | EFDIWGQGTMVT | | | | | | | |
| | IK | | | | | | | | VSS | | | | | | | |
| KIRDL1/ | EIVLTQSPVTL | 1537 | QSVS | 1538 | DAS | 1539 | QQRS | 1540 | QVQLVQSGAEV | 1541 | GGTF | 1542 | FIPI | 1543 | ARIP | 1544 |
| 2/3 | SLSPGERATLS | | SY | | | | NWM | | KKPGSSVKVSCK | | SFYA | | FGAA | | SGSY | |
| | CRASQSVSSY | | | | | | YT | | ASGGTFSFYAIS | | | | | | YYDY | |
| | LAWYQQKPG | | | | | | | | WVRQAPGQGLE | | | | | | DMDV | |
| | QAPRLLIYDAS | | | | | | | | WMGGFIPIFGAA | | | | | | | |
| | NRATGIPARFS | | | | | | | | NYAQKFQGRVTI | | | | | | | |
| | GSGSGTDFTLT | | | | | | | | TADESTSTAYME | | | | | | | |
| | ISSLEPEDFAV | | | | | | | | LSSLRSDDTAVY | | | | | | | |
| | YYCQQRSNW | | | | | | | | YCARIPSGSYYY | | | | | | | |
| | MYTFGQGTKL | | | | | | | | DYDMDVWGQGT | | | | | | | |
| | EIK | | | | | | | | TVTVSS | | | | | | | |
| LINGO1 | DIQMTQSPAT | 1545 | QSVS | 1546 | DAS | 1547 | QQRS | 1548 | EVQLLESGGGLV | 1549 | GFTF | 1550 | IGPS | 1551 | ATEG | 1552 |
| | LSLSPGERATL | | SY | | | | NWP | | QPGGSLRLSCAA | | SAYE | | GGFT | | DNDA | |
| | SCRASQSVSSY | | | | | | MYT | | SGFTFSAYEMKW | | | | | | FDI | |
| | LAWYQQKPG | | | | | | | | VRQAPGKGLEW | | | | | | | |
| | QAPRLLIYDAS | | | | | | | | VSVIGPSGGFTFY | | | | | | | |
| | NRATGIPARFS | | | | | | | | ADSVKGRFTISR | | | | | | | |
| | GSGSGTDFTLT | | | | | | | | DNSKNTLYLQM | | | | | | | |
| | ISSLEPEDFAV | | | | | | | | NSLRAEDTAVYY | | | | | | | |
| | YYCQQRSNWP | | | | | | | | CATEGDNDAFDI | | | | | | | |
| | MYTFGQGTKL | | | | | | | | WGQGTTVTVSS | | | | | | | |
| | EIK | | | | | | | | | | | | | | | |
| LOXL2 | DIVMTQTPLSL | 1553 | KSLL | 1554 | RMS | 1555 | MQH | 1556 | QVQLVQSGAEV | 1557 | GYA | 1558 | INPG | 1559 | ARNW | 1560 |
| | SVTPGQPASIS | | HSNG | | | | LEYP | | KKPGASVKVSCK | | FTYY | | SGGT | | MNFD | |
| | CRSSKSLLHSN | | NTY | | | | YT | | ASGYAFTYYLIE | | L | | | | Y | |
| | GNTYLYWFLQ | | | | | | | | WVRQAPGQGLE | | | | | | | |
| | KPGQSPQFLIY | | | | | | | | WIGVINPGSGGT | | | | | | | |
| | RMSNLASGVP | | | | | | | | NYNEKFKGRATI | | | | | | | |
| | DRFSGSGSGT | | | | | | | | TADKSTSTAYME | | | | | | | |
| | DFTLKISRVEA | | | | | | | | LSSLRSEDTAVYF | | | | | | | |
| | EDVGVYYCM | | | | | | | | CARNWMNFDY | | | | | | | |
| | QHLEYPYTFG | | | | | | | | WGQGTTVTVSS | | | | | | | |
| | GGTKVEIK | | | | | | | | | | | | | | | |
| Ly6/PLA | ESVLTQPPSVS | 1561 | SSNI | 1562 | DNN | 1563 | AAW | 1564 | EVQLLESGGGLV | 1565 | GFTF | 1566 | ISSS | 1567 | AREG | 1568 |
| UR | GAPGQRVTISC | | GAGY | | | | DDR | | QPGGSLRLSCAA | | SNA | | GSTI | | LWAF | |
| domain- | TGSSSNIGAGY | | V | | | | LNGP | | SGFTFSNAWMS | | W | | | | DY | |
| con- | VVHWYQQLP | | | | | | V | | WVRQAPGKGLE | | | | | | | |
| taining | GTAPKLLIYD | | | | | | | | WVSYISSSGSTIY | | | | | | | |
| protein | NNKRPSGVPD | | | | | | | | YADSVKGRFTIS | | | | | | | |
| 3 | RFSGSKSGTSA | | | | | | | | RDNSKNTLYLQ | | | | | | | |
| | SLAISGLRSED | | | | | | | | MNSLRAEDTAV | | | | | | | |
| | EADYYCAAW | | | | | | | | YYCAREGLWAF | | | | | | | |
| | DDRLNGPVFG | | | | | | | | DYWGQGTLVTV | | | | | | | |
| | GGTKLTVL | | | | | | | | SS | | | | | | | |
| MADCA | DIVMTQTPLSL | 1569 | QSLL | 1570 | EVS | 1571 | MQNI | 1572 | QVQLVQSGAEV | 1573 | GYTF | 1574 | ISVY | 1575 | AREG | 1576 |
| M1 | SVTPGQPASIS | | HTDG | | | | QLP | | KKPGASVKVSCK | | TSYG | | SGNT | | SSSS | |
| | CKSSQSLLHT | | TTY | | | | WT | | ASGYTFTSYGIN | | | | | | GDYY | |
| | DGTTYLYWYL | | | | | | | | WVRQAPGQGLE | | | | | | YGMD | |
| | QKPGQPPQLLI | | | | | | | | WMGWISVYSGN | | | | | | V | |
| | YEVSNRFSGV | | | | | | | | TNYAQKVQGRV | | | | | | | |
| | PDRFSGSGSGT | | | | | | | | TMTADTSTSTAY | | | | | | | |
| | DFTLKISRVEA | | | | | | | | MDLRSLRSDDTA | | | | | | | |
| | EDVGIYYCMQ | | | | | | | | VYYCAREGSSSS | | | | | | | |
| | NIQLPWTFGQ | | | | | | | | GDYYYGMDVW | | | | | | | |
| | GTKVEIK | | | | | | | | GQGTTVTVSS | | | | | | | |
| MAG | DIVMTQSPDSL | 1577 | HSVL | 1578 | WAS | 1579 | HQY | 1580 | QVQLVQSGSELK | 1581 | GYTF | 1582 | INTY | 1583 | ARNP | 1584 |
| | AVSLGERATIN | | YSSN | | | | LSSL | | KPGASVKVSCKA | | TNY | | TGEP | | INYY | |
| | CKSSHSVLYSS | | QKNY | | | | T | | SGYTFTNYGMN | | G | | | | GINY | |
| | NQKNYLAWY | | | | | | | | WVRQAPGQGLE | | | | | | EGYV | |
| | QQKPGQPPKL | | | | | | | | WMGWINTYTGE | | | | | | MDY | |
| | LIYWASTRES | | | | | | | | PTYADDFTGRFV | | | | | | | |
| | GVPDRFSGSG | | | | | | | | FSLDTSVSTAYL | | | | | | | |
| | SGTDFTLTISS | | | | | | | | QISSLKAEDTAV | | | | | | | |
| | LQAEDVAVYY | | | | | | | | YYCARNPINYYG | | | | | | | |
| | CHQYLSSLTF | | | | | | | | INYEGYVMDYW | | | | | | | |
| | GQGTKLEIK | | | | | | | | GQGTLVTVSS | | | | | | | |
| Meso- | DIALTQPASVS | 1585 | SSDI | 1586 | GVN | 1587 | SSYD | 1588 | QVELVQSGAEVK | 1589 | GYSF | 1590 | IDPG | 1591 | ARGQ | 1592 |
| thelin | GSPGQSITISCT | | GGYN | | | | IESA | | KPGESLKISCKGS | | TSY | | DSRT | | LYGG | |
| | GTSSDIGGYNS | | S | | | | TPV | | GYSFTSYWIGWV | | W | | | | TYMD | |
| | VSWYQQHPG | | | | | | | | RQAPGKGLEWM | | | | | | G | |
| | KAPKLMIYGV | | | | | | | | GIIDPGDSRTRYS | | | | | | | |
| | NNRPSGVSNR | | | | | | | | PSFQGQVTISADK | | | | | | | |
| | FSGSKSGNTAS | | | | | | | | SISTAYLQWSSLK | | | | | | | |
| | LTISGLQAEDE | | | | | | | | ASDTAMYYCAR | | | | | | | |
| | ADYYCSSYDI | | | | | | | | GQLYGGTYMDG | | | | | | | |
| | ESATPVFGGG | | | | | | | | WGQGTLVTVSS | | | | | | | |
| | TKLTVL | | | | | | | | | | | | | | | |
| Meso- | DIELTQSPAIM | 1593 | SSVS | 1594 | DTS | 1595 | QQW | 1596 | QVQLQQSGPELE | 1597 | GYSF | 1598 | ITPY | 1599 | ARGG | 1600 |
| thelin | SASPGEKVTM | | Y | | | | SKHP | | KPGASVKISCKA | | TGY | | NGAS | | YDGR | |
| | TCSASSSVSY | | | | | | LT | | SGYSFTGYTMN | | T | | | | GFDY | |
| | MHWYQQKSG | | | | | | | | WVKQSHGKSLE | | | | | | | |
| | TSPKRWIYDTS | | | | | | | | WIGLITPYNGASS | | | | | | | |
| | KLASGVPGRF | | | | | | | | YNQKFRGKATLT | | | | | | | |
| | SGSGSGNSYSL | | | | | | | | VDKSSSTAYMDL | | | | | | | |
| | TISSVEAEDDA | | | | | | | | LSLTSEDSAVYFC | | | | | | | |
| | TYYCQQWSK | | | | | | | | ARGGYDGRGFD | | | | | | | |
| | HPLTFGSGTK | | | | | | | | YWGSGTPVTVSS | | | | | | | |
| | VEIK | | | | | | | | | | | | | | | |
| MT1- | DIQMTQSPSSL | 1601 | QDVR | 1602 | SSS | 1603 | QQH | 1604 | QVQLQESGPGLV | 1605 | GFSL | 1606 | IWTG | 1607 | ARYY | 1608 |
| MMP | SASVGDRVTIT | | NT | | | | YITP | | KPSETLSLTCTVS | | LSYG | | GTT | | YGMD | |
| (MMP14) | CKASQDVRNT | | | | | | YT | | GFSLLSYGVHWV | | | | | | Y | |
| | VAWYQQKPG | | | | | | | | RQPPGKGLEWLG | | | | | | | |
| | KAPKLLIYSSS | | | | | | | | VIWTGGTTNYNS | | | | | | | |
| | YRNTGVPDRF | | | | | | | | ALMSRFTISKDDS | | | | | | | |
| | SGSGSGTDFTL | | | | | | | | KNTVYLKMNSL | | | | | | | |
| | TISSLQAEDVA | | | | | | | | KTEDTAIYYCAR | | | | | | | |
| | VYYCQQHYIT | | | | | | | | YYYGMDYWGQ | | | | | | | |
| | PYTFGGGTKV | | | | | | | | GTLVTVSS | | | | | | | |
| | EIK | | | | | | | | | | | | | | | |
| MUC1 | DIQLTQSPSSL | 1609 | SSVS | 1610 | STS | 1611 | HQW | 1612 | QVQLQQSGAEV | 1613 | GYTF | 1614 | INPY | 1615 | ARGF | 1616 |
| | SASVGDRVTM | | SSY | | | | NRYP | | KKPGASVKVSCE | | PSYV | | NDGT | | GGSY | |
| | TCSASSSVSSS | | | | | | YT | | ASGYTFPSYVLH | | | | | | GFAY | |
| | YLYWYQQKP | | | | | | | | WVKQAPGQGLE | | | | | | | |
| | GKAPKLWIYS | | | | | | | | WIGYINPYNDGT | | | | | | | |
| | TSNLASGVPA | | | | | | | | QYNEKFKGKATL | | | | | | | |
| | RFSGSGSGTDF | | | | | | | | TRDTSINTAYME | | | | | | | |
| | TLTISSLQPED | | | | | | | | LSRLRSDDTAVY | | | | | | | |
| | SASYFCHQWN | | | | | | | | YCARGFGGSYGF | | | | | | | |
| | RYPYTFGGGT | | | | | | | | AYWGQGTLVTV | | | | | | | |
| | RLEIK | | | | | | | | SS | | | | | | | |
| Mucin | QVVLTQSPVI | 1617 | SSIS | 1618 | DTS | 1619 | HQR | 1620 | QVQLKESGPDLV | 1621 | GFSL | 1622 | IWGD | 1623 | VKPG | 1624 |
| 5AC | MSASPGEKVT | | Y | | | | DSYP | | APSQSLSITCTVS | | SKFG | | GST | | GDY | |
| | MTCSASSSISY | | | | | | WT | | GFSLSKFGVNWV | | | | | | | |
| | MYWYQQKPG | | | | | | | | RQPPGKGLEWLG | | | | | | | |
| | TSPKRWIYDTS | | | | | | | | VIWGDGSTSYNS | | | | | | | |
| | KLASGVPARF | | | | | | | | GLISRLSISKENS | | | | | | | |
| | SGSGSGTSYSL | | | | | | | | KSQVFLKLNSLQ | | | | | | | |
| | TISNMEAGDA | | | | | | | | ADDTATYYCVKP | | | | | | | |
| | ATYYCHQRDS | | | | | | | | GGDYWGHGTSV | | | | | | | |
| | YPWTFGGGIN | | | | | | | | TVSS | | | | | | | |
| | LEIK | | | | | | | | | | | | | | | |
| NaPi2b | DIQMTQSPSSL | 1625 | ETLV | 1626 | RVS | 1627 | FQGS | 1628 | EVQLVESGGGLV | 1629 | GFSF | 1630 | IGRV | 1631 | ARHR | 1632 |
| | SASVGDRVTIT | | HSSG | | | | FNPL | | QPGGSLRLSCAA | | SDFA | | AFHT | | GFDV | |
| | CRSSETLVHSS | | NTY | | | | T | | SGFSFSDFAMSW | | | | | | GHFD | |
| | GNTYLEWYQ | | | | | | | | VRQAPGKGLEW | | | | | | F | |
| | QKPGKAPKLLI | | | | | | | | VATIGRVAFHTY | | | | | | | |
| | YRVSNRFSGV | | | | | | | | YPDSMKGRFTIS | | | | | | | |
| | PSRFSGSGSGT | | | | | | | | RDNSKNTLYLQ | | | | | | | |
| | DFTLTISSLQP | | | | | | | | MNSLRAEDTAV | | | | | | | |
| | EDFATYYCFQ | | | | | | | | YYCARHRGFDV | | | | | | | |
| | GSFNPLTFGQ | | | | | | | | GHFDFWGQGTL | | | | | | | |
| | GTKVEIK | | | | | | | | VTVSS | | | | | | | |
| NeuGc- | DIVMTQSHKF | 1633 | QDVS | 1634 | SAS | 1635 | QQH | 1636 | EVQLKESGPGLV | 1637 | GFSL | 1638 | IWGG | 1639 | ARSG | 1640 |
| GM3 | MSTSVGDRVS | | TA | | | | YSTP | | APSQSLSITCTVS | | SRYS | | GST | | VREG | |
| | ITCKASQDVST | | | | | | WT | | GFSLSRYSVHWV | | | | | | RAQA | |
| | AVAWYQQKP | | | | | | | | RQPPGKGLEWLG | | | | | | WFAY | |
| | GQSPKLLIYSA | | | | | | | | MIWGGGSTDYNS | | | | | | | |
| | SYRYTGVPDR | | | | | | | | ALKSRLSISKDNS | | | | | | | |
| | FTGSGSGTDFT | | | | | | | | KSQVFLKMNSLQ | | | | | | | |
| | FTISSVQAEDL | | | | | | | | TDDTAMYYCAR | | | | | | | |
| | AVYYCQQHYS | | | | | | | | SGVREGRAQAW | | | | | | | |
| | TPWTFGGGTK | | | | | | | | FAYWGQGTLVT | | | | | | | |
| | LELK | | | | | | | | VSA | | | | | | | |
| NKG2A | DIQMTQSPSSL | 1641 | ENIY | 1642 | NAK | 1643 | QHH | 1644 | QVQLVQSGAEV | 1645 | GYTF | 1646 | IDPY | 1647 | ARGG | 1648 |
| | SASVGDRVTIT | | SY | | | | YGTP | | KKPGASVKVSCK | | TSY | | DSET | | YDFD | |
| | CRASENIYSYL | | | | | | RT | | ASGYTFTSYWM | | W | | | | VGTL | |
| | AWYQQKPGK | | | | | | | | NWVRQAPGQGL | | | | | | YWFF | |
| | APKLLIYNAK | | | | | | | | EWMGRIDPYDSE | | | | | | DV | |
| | TLAEGVPSRFS | | | | | | | | THYAQKLQGRV | | | | | | | |
| | GSGSGTDFTLT | | | | | | | | TMTTDTSTSTAY | | | | | | | |
| | ISSLQPEDFAT | | | | | | | | MELRSLRSDDTA | | | | | | | |
| | YYCQHHYGTP | | | | | | | | VYYCARGGYDF | | | | | | | |
| | RTFGGGTKVEI | | | | | | | | DVGTLYWFFDV | | | | | | | |
| | K | | | | | | | | WGQGTTVTVSS | | | | | | | |
| notch | QAVVTQEPSL | 1649 | TGAV | 1650 | GTN | 1651 | ALW | 1652 | QVQLVQSGAEV | 1653 | GAS | 1654 | ILPG | 1655 | ARFD | 1656 |
| | TVSPGGTVTL | | TTSN | | | | YSN | | KKPGASVKISCK | | VKIS | | TGRT | | GNYG | |
| | TCRSSTGAVT | | Y | | | | HWV | | VSGYTLRGYWIE | | CKV | | | | YYAM | |
| | TSNYANWFQQ | | | | | | | | WVRQAPGKGLE | | S | | | | DYW | |
| | KPGQAPRTLIG | | | | | | | | WIGQILPGTGRT | | | | | | | |
| | GTNNRAPGVP | | | | | | | | NYNEKFKGRVT | | | | | | | |
| | ARFSGSLLGG | | | | | | | | MTADTSTDTAY | | | | | | | |
| | KAALTLSGAQ | | | | | | | | MELSSLRSEDTA | | | | | | | |
| | PEDEAEYYCA | | | | | | | | VYYCARFDGNY | | | | | | | |
| | LWYSNHWVF | | | | | | | | GYYAMDYWGQ | | | | | | | |
| | GGGTKLTV | | | | | | | | GTTVTVSS | | | | | | | |
| NOTCH2/ | DIVLTQSPATL | 1657 | QSVR | 1658 | GAS | 1659 | QQY | 1660 | EVQLVESGGGLV | 1661 | GFTF | 1662 | IASS | 1663 | ARSI | 1664 |
| NOTCH3 | SLSPGERATLS | | SNY | | | | SNFP | | QPGGSLRLSCAA | | SSSG | | GSNT | | FYTT | |
| recep- | CRASQSVRSN | | | | | | IT | | SGFTFSSSGMSW | | | | | | | |
| tors | YLAWYQQKP | | | | | | | | VRQAPGKGLEW | | | | | | | |
| | GQAPRLLIYG | | | | | | | | VSVIASSGSNTYY | | | | | | | |
| | ASSRATGVPA | | | | | | | | ADSVKGRFTISR | | | | | | | |
| | RFSGSGSGTDF | | | | | | | | DNSKNTLYLQM | | | | | | | |
| | TLTISSLEPEDF | | | | | | | | NSLRAEDTAVYY | | | | | | | |
| | AVYYCQQYSN | | | | | | | | CARSIFYTTWGQ | | | | | | | |
| | FPITFGQGTKV | | | | | | | | GTLVTVSS | | | | | | | |
| | EIK | | | | | | | | | | | | | | | |
| NRP1 | DIQMTQSPSSL | 1665 | QYFS | 1666 | GAS | 1667 | QQY | 1668 | EVQLVESGGGLV | 1669 | GFTF | 1670 | ISPA | 1671 | ARGE | 1672 |
| | SASVGDRVTIT | | SY | | | | LGSP | | QPGGSLRLSCAA | | SSYA | | GGYT | | LPYY | |
| | CRASQYFSSY | | | | | | PT | | SGFTFSSYAMSW | | | | | | RMSK | |
| | LAWYQQKPG | | | | | | | | VRQAPGKGLEW | | | | | | VMDV | |
| | KAPKLLIYGAS | | | | | | | | VSQISPAGGYTN | | | | | | | |
| | SRASGVPSRFS | | | | | | | | YADSVKGRFTIS | | | | | | | |
| | GSGSGTDFTLT | | | | | | | | ADTSKNTAYLQ | | | | | | | |
| | ISSLQPEDFAT | | | | | | | | MNSLRAEDTAV | | | | | | | |
| | YYCQQYLGSP | | | | | | | | YYCARGELPYYR | | | | | | | |
| | PTFGQGTKVEI | | | | | | | | MSKVMDVWGQ | | | | | | | |
| | K | | | | | | | | GTLVTVSS | | | | | | | |
| oxLDL | QSVLTQPPSAS | 1673 | NTNI | 1674 | ANS | 1675 | ASW | 1676 | EVQLLESGGGLV | 1677 | GFTF | 1678 | ISVG | 1679 | ARIR | 1680 |
| | GTPGQRVTISC | | GKNY | | | | DASL | | QPGGSLRLSCAA | | SNA | | GHRT | | VGPS | |
| | SGSNTNIGKN | | | | | | NGW | | SGFTFSNAWMS | | W | | | | GGAF | |
| | YVSWYQQLPG | | | | | | V | | WVRQAPGKGLE | | | | | | DY | |
| | TAPKLLIYANS | | | | | | | | WVSSISVGGHRT | | | | | | | |
| | NRPSGVPDRFS | | | | | | | | YYADSVKGRSTI | | | | | | | |
| | GSKSGTSASL | | | | | | | | SRDNSKNTLYLQ | | | | | | | |
| | AISGLRSEDEA | | | | | | | | MNSLRAEDTAV | | | | | | | |
| | DYYCASWDA | | | | | | | | YYCARIRVGPSG | | | | | | | |
| | SLNGWVFGGG | | | | | | | | GAFDYWGQGTL | | | | | | | |
| | TKLTVL | | | | | | | | VTVSS | | | | | | | |
| P- | EIVLTQSPATL | 1681 | QSVS | 1682 | DAS | 1683 | QQRS | 1684 | EVQLVESGGGLV | 1685 | GFTF | 1686 | ITAA | 1687 | ARGR | 1688 |
| selectin | SLSPGERATLS | | SY | | | | NWP | | RPGGSLRLSCAA | | SNY | | GDI | | YSGS | |
| | CRASQSVSSY | | | | | | LT | | SGFTFSNYDMH | | D | | | | GSYY | |
| | LAWYQQKPG | | | | | | | | WVRQATGKGLE | | | | | | NDWF | |
| | QAPRLLIYDAS | | | | | | | | WVSAITAAGDIY | | | | | | DP | |
| | NRATGIPARFS | | | | | | | | YPGSVKGRFTISR | | | | | | | |
| | GSGSGTDFTLT | | | | | | | | ENAKNSLYLQM | | | | | | | |
| | ISSLEPEDFAV | | | | | | | | NSLRAGDTAVYY | | | | | | | |
| | YYCQQRSNWP | | | | | | | | CARGRYSGSGSY | | | | | | | |
| | LTFGGGTKVEI | | | | | | | | YNDWFDPWGQG | | | | | | | |
| | K | | | | | | | | TLVTVSS | | | | | | | |
| PCSK9 | DIVMTQSPDSL | 1689 | QSVL | 1690 | WAS | 1691 | QQY | 1692 | EVQLVESGGGLV | 1693 | GFTF | 1694 | ISGS | 1695 | AKDS | 1696 |
| | AVSLGERATIN | | YRSN | | | | YTTP | | QPGGSLRLSCAA | | NNY | | GGTT | | NWGN | |
| | CKSSQSVLYR | | NRNF | | | | YT | | SGFTFNNYAMN | | A | | | | FDL | |
| | SNNRNFLGWY | | | | | | | | WVRQAPGKGLD | | | | | | | |
| | QQKPGQPPNL | | | | | | | | WVSTISGSGGTT | | | | | | | |
| | LIYWASTRES | | | | | | | | NYADSVKGRFIIS | | | | | | | |
| | GVPDRFSGSG | | | | | | | | RDSSKHTLYLQM | | | | | | | |
| | SGTDFTLTISS | | | | | | | | NSLRAEDTAVYY | | | | | | | |
| | LQAEDVAVYY | | | | | | | | CAKDSNWGNFD | | | | | | | |
| | CQQYYTTPYT | | | | | | | | LWGRGTLVTVSS | | | | | | | |
| | FGQGTKLEIK | | | | | | | | | | | | | | | |
| PCSK9 | ESALTQPASVS | 1697 | SSDV | 1698 | EVS | 1699 | NSYT | 1700 | EVQLVQSGAEVK | 1701 | GYT | 1702 | VSFY | 1703 | ARGY | 1704 |
| | GSPGQSITISCT | | GGYN | | | | STSM | | KPGASVKVSCKA | | LTSY | | NGNT | | GMDV | |
| | GTSSDVGGYN | | S | | | | V | | SGYTLTSYGISW | | G | | | | | |
| | SVSWYQQHPG | | | | | | | | VRQAPGQGLEW | | | | | | | |
| | KAPKLMIYEV | | | | | | | | MGWVSFYNGNT | | | | | | | |
| | SNRPSGVSNRF | | | | | | | | NYAQKLQGRGT | | | | | | | |
| | SGSKSGNTAS | | | | | | | | MTTDPSTSTAYM | | | | | | | |
| | LTISGLQAEDE | | | | | | | | ELRSLRSDDTAV | | | | | | | |
| | ADYYCNSYTS | | | | | | | | YYCARGYGMDV | | | | | | | |
| | TSMVFGGGTK | | | | | | | | WGQGTTVTVSS | | | | | | | |
| | LTVL | | | | | | | | | | | | | | | |
| PCSK9 | DIQMTQSPSSL | 1705 | QGIS | 1706 | SAS | 1707 | QQR | 1708 | QVQLVQSGAEV | 1709 | GYTF | 1710 | ISPF | 1711 | ARER | 1712 |
| | SASVGDRVTIT | | SA | | | | YSL | | KKPGASVKVSCK | | TSYY | | GGRT | | PLYA | |
| | CRASQGISSAL | | | | | | WRT | | ASGYTFTSYYMH | | | | | | SDL | |
| | AWYQQKPGK | | | | | | | | WVRQAPGQGLE | | | | | | | |
| | APKLLIYSASY | | | | | | | | WMGEISPFGGRT | | | | | | | |
| | RYTGVPSRFS | | | | | | | | NYNEKFKSRVTM | | | | | | | |
| | GSGSGTDFTFT | | | | | | | | TRDTSTSTVYME | | | | | | | |
| | ISSLQPEDIAT | | | | | | | | LSSLRSEDTAVY | | | | | | | |
| | YYCQQRYSL | | | | | | | | YCARERPLYASD | | | | | | | |
| | WRTFGQGTKL | | | | | | | | LWGQGTTVTVSS | | | | | | | |
| | EIK | | | | | | | | | | | | | | | |
| PDGFR | EIVLTQSPATL | 1713 | QSVS | 1714 | DAS | 1715 | QQRS | 1716 | QLQLQESGPGLV | 1717 | GGSI | 1718 | FFYT | 1719 | ARQS | 1720 |
| A | SLSPGERATLS | | SY | | | | NWP | | KPSETLSLTCTVS | | NSSS | | GST | | TYYY | |
| | CRASQSVSSY | | | | | | PA | | GGSINSSSYYWG | | YY | | | | GSGN | |
| | LAWYQQKPG | | | | | | | | WLRQSPGKGLE | | | | | | YYGW | |
| | QAPRLLIYDAS | | | | | | | | WIGSFFYTGSTY | | | | | | FDR | |
| | NRATGIPARFS | | | | | | | | YNPSLRSRLTISV | | | | | | | |
| | GSGSGTDFTLT | | | | | | | | DTSKNQFSLMLS | | | | | | | |
| | ISSLEPEDFAV | | | | | | | | SVTAADTAVYYC | | | | | | | |
| | YYCQQRSNWP | | | | | | | | ARQSTYYYGSGN | | | | | | | |
| | PAFGQGTKVEI | | | | | | | | YYGWFDRWDQG | | | | | | | |
| | K | | | | | | | | TLVTVSS | | | | | | | |
| PDGFRa | DIQMTQSPSSL | 1721 | QSFS | 1722 | AAS | 1723 | QQT | 1724 | QVQLVESGGGLV | 1725 | GFTF | 1726 | ISSS | 1727 | AREG | 1728 |
| | SASVGDRVSIT | | RY | | | | YSNP | | KPGGSLRLSCAA | | SDY | | GSII | | RIAA | |
| | CRPSQSFSRYI | | | | | | PIT | | SGFTFSDYYMN | | Y | | | | RGMD | |
| | NWYQQKPGK | | | | | | | | WIRQAPGKGLE | | | | | | V | |
| | APKLLIHAASS | | | | | | | | WVSYISSSGSIIY | | | | | | | |
| | LVGGVPSRFS | | | | | | | | YADSVKGRFTIS | | | | | | | |
| | GSGSGTDFTLT | | | | | | | | RDNAKNSLYLQ | | | | | | | |
| | ISSLQPEDFAT | | | | | | | | MNSLRAEDTAV | | | | | | | |
| | YYCQQTYSNP | | | | | | | | YYCAREGRIAAR | | | | | | | |
| | PITFGQGTRLE | | | | | | | | GMDVWGQGTTV | | | | | | | |
| | MK | | | | | | | | TVSS | | | | | | | |
| phospha- | DIQMTQSPSSL | 1729 | QDIG | 1730 | ATS | 1731 | LQY | 1732 | EVQLQQSGPELE | 1733 | GYSF | 1734 | IDPY 1735 | VKGG | 1736 | |
| tidyl- | SASLGERVSLT | | SS | | | | VSSP | | KPGASVKLSCKA | | TGY | | Y | GDT | | YYGH |
| serine | CRASQDIGSSL | | | | | | PT | | SGYSFTGYNMN | | N | | | | WYFD | |
| | NWLQQGPDG | | | | | | | | WVKQSHGKSLE | | | | | | V | |
| | TIKRLIYATSS | | | | | | | | WIGHIDPYYGDT | | | | | | | |
| | LDSGVPKRFS | | | | | | | | SYNQKFRGKATL | | | | | | | |
| | GSRSGSDYSLT | | | | | | | | TVDKSSSTAYMQ | | | | | | | |
| | ISSLESEDFVD | | | | | | | | LKSLTSEDSAVY | | | | | | | |
| | YYCLQYVSSP | | | | | | | | YCVKGGYYGHW | | | | | | | |
| | PTFGAGTKLE | | | | | | | | YFDVWGAGTTV | | | | | | | |
| | LK | | | | | | | | TVSS | | | | | | | |
| polysi- | DVVMTQTPLS | 1737 | QSLV | 1738 | RVS | 1739 | FQGT | 1740 | QIQLQQSGPELV | 1741 | GYTF | 1742 | IYPG | 1743 | ARGG | 1744 |
| alic | LPVSLGDQASI | | HSNG | | | | HVP | | RPGASVKISCKAS | | TDY | | SGNT | | KFAM | |
| acid | SCRSSQSLVHS | | NTY | | | | YT | | GYTFTDYYIHWV | | Y | | | | DY | |
| | NGNTYLYWY | | | | | | | | KQRPGEGLEWIG | | | | | | | |
| | LQKPGQSPKP | | | | | | | | WIYPGSGNTKYN | | | | | | | |
| | LIYRVSNRFSG | | | | | | | | EKFKGKATLTVD | | | | | | | |
| | VPDRFSGSGS | | | | | | | | TSSSTAYMQLSS | | | | | | | |
| | GTDFTLKISRV | | | | | | | | LTSEDSAVYFCA | | | | | | | |
| | EAEDLGVYFC | | | | | | | | RGGKFAMDYWG | | | | | | | |
| | FQGTHVPYTF | | | | | | | | QGTSVTVSS | | | | | | | |
| | GGGTRLEIK | | | | | | | | | | | | | | | |
| PSMA | DIVMTQSHKF | 1745 | QDVG | 1746 | WAS | 1747 | QQY | 1748 | EVQLQQSGPELV | 1749 | GYTF | 1750 | INPN | 1751 | AAGW | 1752 |
| | MSTSVGDRVS | | TA | | | | NSYP | | KPGTSVRISCKTS | | TEYT | | NGGT | | NFDY | |
| | IICKASQDVGT | | | | | | LTFG | | GYTFTEYTIHWV | | | | | | | |
| | AVDWYQQKP | | | | | | AGT | | KQSHGKSLEWIG | | | | | | | |
| | GQSPKLLIYW | | | | | | M | | NINPNNGGTTYN | | | | | | | |
| | ASTRHTGVPD | | | | | | | | QKFEDKATLTVD | | | | | | | |
| | RFTGSGSGTDF | | | | | | | | KSSSTAYMELRS | | | | | | | |
| | TLTITNVQSED | | | | | | | | LTSEDSAVYYCA | | | | | | | |
| | LADYFCQQYN | | | | | | | | AGWNFDYWGQG | | | | | | | |
| | SYPLTFGAGT | | | | | | | | TTLTVSS | | | | | | | |
| | MLDLK | | | | | | | | | | | | | | | |
| PSMA | DIQMTQSPSSL | 1753 | QNVD | 1754 | SAS | 1755 | QQY | 1756 | QVQLVESGGGLV | 1757 | GFTF | 1758 | ISDG | 1759 | ARGF | 1760 |
| | SASVGDRVTIT | | TN | | | | DSYP | | KPGESLRLSCAA | | SDY | | GYYT | | PLLR | |
| | CKASQNVDTN | | | | | | YT | | SGFTFSDYYMY | | Y | | | | HGAM | |
| | VAWYQQKPG | | | | | | | | WVRQAPGKGLE | | | | | | DY | |
| | QAPKSLIYSAS | | | | | | | | WVAIISDGGYYT | | | | | | | |
| | YRYSDVPSRFS | | | | | | | | YYSDIIKGRFTISR | | | | | | | |
| | GSASGTDFTLT | | | | | | | | DNAKNSLYLQM | | | | | | | |
| | ISSVQSEDFAT | | | | | | | | NSLKAEDTAVYY | | | | | | | |
| | YYCQQYDSYP | | | | | | | | CARGFPLLRHGA | | | | | | | |
| | YTFGGGTKLEI | | | | | | | | MDYWGQGTLVT | | | | | | | |
| | K | | | | | | | | VSS | | | | | | | |
| PVRL4 | DIQMTQSPSSV | 1761 | QGIS | 1762 | AAS | 1763 | QQA | 1764 | EVQLVESGGGLV | 1765 | GFTF | 1766 | ISSS | 1767 | ARAY | 1768 |
| | SASVGDRVTIT | | GW | | | | NSFP | | QPGGSLRLSCAA | | SSYN | | SSTI | | YYGM | |
| | CRASQGISGW | | | | | | PT | | SGFTFSSYNMNW | | | | | | DV | |
| | LAWYQQKPG | | | | | | | | VRQAPGKGLEW | | | | | | | |
| | KAPKFLIYAAS | | | | | | | | VSYISSSSSTIYYA | | | | | | | |
| | TLQSGVPSRFS | | | | | | | | DSVKGRFTISRD | | | | | | | |
| | GSGSGTDFTLT | | | | | | | | NAKNSLSLQMNS | | | | | | | |
| | ISSLQPEDFAT | | | | | | | | LRDEDTAVYYCA | | | | | | | |
| | YYCQQANSFP | | | | | | | | RAYYYGMDVW | | | | | | | |
| | PTFGGGTKVEI | | | | | | | | GQGTTVTVSS | | | | | | | |
| | K | | | | | | | | | | | | | | | |
| RGMA | QSALTQPRSVS | 1769 | SSSV | 1770 | DVT | 1771 | YSY | 1772 | EVQLVQSGAEVK | 1773 | GYTF | 1774 | ISPY | 1775 | ARVG | 1776 |
| | GSPGQSVTISC | | GDSI | | | | AGT | | KPGASVKVSCKA | | TSHG | | SGNT | | SGPY | |
| | TGTSSSVGDSI | | Y | | | | DTL | | SGYTFTSHGISW | | | | | | YYMD | |
| | YVSWYQQHP | | | | | | | | VRQAPGQGLDW | | | | | | V | |
| | GKAPKLMLYD | | | | | | | | MGWISPYSGNTN | | | | | | | |
| | VTKRPSGVPD | | | | | | | | YAQKLQGRVTM | | | | | | | |
| | RFSGSKSGNT | | | | | | | | TTDTSTSTAYME | | | | | | | |
| | ASLTISGLQAE | | | | | | | | LSSLRSEDTAVY | | | | | | | |
| | DEADYYCYSY | | | | | | | | YCARVGSGPYYY | | | | | | | |
| | AGTDTLFGGG | | | | | | | | MDVWGQGTLVT | | | | | | | |
| | TKVTVL | | | | | | | | VSS | | | | | | | |
| CD240D | AIRMTQSPSSF | 1777 | QDIR | 1778 | AAS | 1779 | QQY | 1780 | QVQLVESGGGV | 1781 | GFTF | 1782 | ISYD | 1783 | ARPV | 1784 |
| Blood | SASTGDRVTIT | | NY | | | | YNSP | | VQPGRSLRLSCT | | KNY | | GRNI | | RSRW | |
| group D | CRASQDIRNY | | | | | | PT | | ASGFTFKNYAMEI | | A | | | | LQLG | |
| antigen | VAWYQQKSG | | | | | | | | WVRQAPAKGLE | | | | | | LEDA | |
| | KAPKFLIYAAS | | | | | | | | WVATISYDGRNI | | | | | | FHI | |
| | TLQSGVPSRFS | | | | | | | | QYADSVKGRFTF | | | | | | | |
| | GSGSGTDFTLT | | | | | | | | SRDNSQDTLYLQ | | | | | | | |
| | INSLQSEDFAT | | | | | | | | LNSLRPEDTAVY | | | | | | | |
| | YYCQQYYNSP | | | | | | | | YCARPVRSRWLQ | | | | | | | |
| | PTFGQGTRVEI | | | | | | | | LGLEDAFHIWGQ | | | | | | | |
| | T | | | | | | | | GTMVTVSS | | | | | | | |
| root | DIQMTQSPSSL | 1785 | QSVD | 1786 | AAS | 1787 | QQS | 1788 | QVQLVQSGAEV | 1789 | GYTF | 1790 | IYPS | 1791 | ATYF | 1792 |
| plate- | SASVGDRVTIT | | YDGD | | | | NEDP | | KKPGASVKVSCK | | TDYS | | NGDS | | ANNF | |
| speci- | CKASQSVDYD | | SY | | | | LT | | ASGYTFTDYSIH | | | | | | DYW | |
| fic | GDSYMNWYQ | | | | | | | | WVRQAPGQGLE | | | | | | | |
| spondin | QKPGKAPKLLI | | | | | | | | WIGYIYPSNGDS | | | | | | | |
| 3 | YAASNLESGV | | | | | | | | GYNQKFKNRVT | | | | | | | |
| | PSRFSGSGSGT | | | | | | | | MTRDTSTSTAYM | | | | | | | |
| | DFTLTISPVQA | | | | | | | | ELSRLRSEDTAV | | | | | | | |
| | EDFATYYCQQ | | | | | | | | YYCATYFANNFD | | | | | | | |
| | SNEDPLTFGA | | | | | | | | YWGQGTTLTVSS | | | | | | | |
| | GTKLELK | | | | | | | | | | | | | | | |
| serum | DIQMTQSPSSL | 1793 | ENIY | 1794 | NAK | 1795 | QHH | 1796 | QVQLVQSGAEV | 1797 | GFTF | 1798 | IYPG | 1799 | ARGD | 1800 |
| amyloid | SASVGDRVTIT | | SY | | | | YGA | | KKPGSSVKVSCK | | ATY | | DGNA | | FDYD | |
| P | CRASENIYSYL | | | | | | PLT | | ASGFTFATYNMH | | N | | | | GGYY | |
| com- | AWYQQKPGK | | | | | | | | WVRQAPGQGLE | | | | | | FDS | |
| ponent | APKLLIHNAK | | | | | | | | WMGYIYPGDGN | | | | | | | |
| | TLAEGVPSRFS | | | | | | | | ANYNQQFKGRV | | | | | | | |
| | GSGSGTDFTLT | | | | | | | | TITADKSTSTAY | | | | | | | |
| | ISSLQPEDFAT | | | | | | | | MELSSLRSEDTA | | | | | | | |
| | YYCQHHYGAP | | | | | | | | VYYCARGDFDY | | | | | | | |
| | LTFGQGTKLEI | | | | | | | | DGGYYFDSWGQ | | | | | | | |
| | K | | | | | | | | GTLVTVSS | | | | | | | |
| STEAP- | DIQMTQSPSSL | 1801 | QSLL | 1802 | WAS | 1803 | QQY | 1804 | EVQLVESGGGLV | 1805 | GYSI | 1806 | ISNS | 1807 | ARER | 1808 |
| 1 | SASVGDRVTIT | | YRSN | | | | YNY | | QPGGSLRLSCAV | | TSDY | | GST | | NYDY | |
| | CKSSQSLLYRS | | QKNY | | | | PRT | | SGYSITSDYAWN | | A | | | | DDYY | |
| | NQKNYLAWY | | | | | | | | WVRQAPGKGLE | | | | | | YAMD | |
| | QQKPGKAPKL | | | | | | | | WVGYISNSGSTS | | | | | | Y | |
| | LIYWASTRES | | | | | | | | YNPSLKSRFTISR | | | | | | | |
| | GVPSRFSGSGS | | | | | | | | DTSKNTLYLQMN | | | | | | | |
| | GTDFTLTISSL | | | | | | | | SLRAEDTAVYYC | | | | | | | |
| | QPEDFATYYC | | | | | | | | ARERNYDYDDY | | | | | | | |
| | QQYYNYPRTF | | | | | | | | YYAMDYWGQGT | | | | | | | |
| | GQGTKVEIK | | | | | | | | LVTVSS | | | | | | | |
| TACST | DIQLTQSPSSL | 1809 | QDVS | 1810 | SAS | 1811 | QQH | 1812 | QVQLQQSGSELK | 1813 | GYTF | 1814 | INTY | 1815 | ARGG | 1816 |
| D2 | SASVGDRVSIT | | IA | | | | YITP | | KPGASVKVSCKA | | TNY | | TGEP | | FGSS | |
| | CKASQDVSIA | | | | | | LT | | SGYTFTNYGMN | | G | | | | YWYF | |
| | VAWYQQKPG | | | | | | | | WVKQAPGQGLK | | | | | | DV | |
| | KAPKLLIYSAS | | | | | | | | WMGWINTYTGE | | | | | | | |
| | YRYTGVPDRF | | | | | | | | PTYTDDFKGRFA | | | | | | | |
| | SGSGSGTDFTL | | | | | | | | FSLDTSVSTAYL | | | | | | | |
| | TISSLQPEDFA | | | | | | | | QISSLKADDTAV | | | | | | | |
| | VYYCQQHYIT | | | | | | | | YFCARGGFGSSY | | | | | | | |
| | PLTFGAGTKV | | | | | | | | WYFDVWGQGSL | | | | | | | |
| | EIK | | | | | | | | VTVSS | | | | | | | |
| TGFb | ETVLTQSPGTL | 1817 | QSLG | 1818 | GAS | 1819 | QQY | 1820 | QVQLVQSGAEV | 1821 | GYTF | 1822 | VIPI | 1823 | ASTL | 1824 |
| | SLSPGERATLS | | SSY | | | | ADSP | | KKPGSSVKVSCK | | SSNV | | VDIA | | GLVL | |
| | CRASQSLGSS | | | | | | IT | | ASGYTFSSNVIS | | | | | | DAMD | |
| | YLAWYQQKP | | | | | | | | WVRQAPGQGLE | | | | | | Y | |
| | GQAPRLLIYG | | | | | | | | WMGGVIPIVDIA | | | | | | | |
| | ASSRAPGIPDR | | | | | | | | NYAQRFKGRVTI | | | | | | | |
| | FSGSGSGTDFT | | | | | | | | TADESTSTTYME | | | | | | | |
| | LTISRLEPEDF | | | | | | | | LSSLRSEDTAVY | | | | | | | |
| | AVYYCQQYA | | | | | | | | YCASTLGLVLDA | | | | | | | |
| | DSPITFGQGTR | | | | | | | | MDYWGQGTLVT | | | | | | | |
| | LEIK | | | | | | | | VSS | | | | | | | |
| TIGIT | DIVMTQSPDSL | 1825 | QTVL | 1826 | WAS | 1827 | QQY | 1828 | EVQLQQSGPGLV | 1829 | GDS | 1830 | TYYR | 1831 | TRES | 1832 |
| | AVSLGERATIN | | YSSN | | | | YSTP | | KPSQTLSLTCAIS | | VSSN | | FKWY | | TTYD | |
| | CKSSQTVLYSS | | NKKY | | | | FT | | GDSVSSNSAAWN | | SAA | | S | | LLAG | |
| | NNKKYLAWY | | | | | | | | WIRQSPSRGLEW | | | | | | PFDY | |
| | QQKPGQPPNL | | | | | | | | LGKTYYRFKWY | | | | | | | |
| | LIYWASTRES | | | | | | | | SDYAVSVKGRITI | | | | | | | |
| | GVPDRFSGSG | | | | | | | | NPDTSKNQFSLQ | | | | | | | |
| | SGTDFTLTISS | | | | | | | | LNSVTPEDTAVF | | | | | | | |
| | LQAEDVAVYY | | | | | | | | YCTRESTTYDLL | | | | | | | |
| | CQQYYSTPFTF | | | | | | | | AGPFDYWGQGT | | | | | | | |
| | GPGTKVEIK | | | | | | | | LVTVSS | | | | | | | |
| TWEAK | DIQMTQSPSSL | 1833 | QSVS | 1834 | YAS | 1835 | QHS | 1836 | EVQLVESGGGLV | 1837 | GFTF | 1838 | IRLK | 1839 | TGYY | 1840 |
| R | SASVGDRVTIT | | TSSY | | | | WEIP | | QPGGSLRLSCAA | | SSY | | SDNY | | ADAM | |
| | CRASQSVSTSS | | SY | | | | YT | | SGFTFSSYWMSW | | W | | AT | | DY | |
| | YSYMHWYQQ | | | | | | | | VRQAPGKGLEW | | | | | | | |
| | KPGKAPKLLIK | | | | | | | | VAEIRLKSDNYA | | | | | | | |
| | YASNLESGVP | | | | | | | | THYAESVKGRFT | | | | | | | |
| | SRFSGSGSGTD | | | | | | | | ISRDDSKNSLYLQ | | | | | | | |
| | FTLTISSLQPE | | | | | | | | MNSLRAEDTAV | | | | | | | |
| | DFATYYCQHS | | | | | | | | YYCTGYYADAM | | | | | | | |
| | WEIPYTFGGG | | | | | | | | DYWGQGTLVTV | | | | | | | |
| | TKVEIK | | | | | | | | SS | | | | | | | |
| TYRP1 | EIVLTQSPATL | 1841 | QSVS | 1842 | DAS | 1843 | QQRS | 1844 | QVQLVQSGSELK | 1845 | GYTF | 1846 | INTN | 1847 | APRY | 1848 |
| | SLSPGERATLS | | SY | | | | NWL | | KPGASVKISCKA | | TSYA | | TGNP | | SSSW | |
| | CRASQSVSSY | | | | | | MYT | | SGYTFTSYAMN | | | | | | YLDY | |
| | LAWYQQKPG | | | | | | | | WVRQAPGQGLE | | | | | | | |
| | QAPRLLIYDAS | | | | | | | | SMGWINTNTGNP | | | | | | | |
| | NRATGIPARFS | | | | | | | | TYAQGFTGRFVF | | | | | | | |
| | GSGSGTDFTLT | | | | | | | | SMDTSVSTAYLQ | | | | | | | |
| | ISSLEPEDFAV | | | | | | | | ISSLKAEDTAIYY | | | | | | | |
| | YYCQQRSNW | | | | | | | | CAPRYSSSWYLD | | | | | | | |
| | LMYTFGQGTK | | | | | | | | YWGQGTLVTVSS | | | | | | | |
| | LEIK | | | | | | | | | | | | | | | |
| VEGFR2 | DIQMTQSPSSL | 1849 | QDIA | 1850 | ATS | 1851 | LQY | 1852 | EVQLVESGGGLV | 1853 | GFTF | 1854 | ITSG | 1855 | VRIG | 1856 |
| | SASVGDRVTIT | | GS | | | | GSFP | | QPGGSLRLSCAA | | SSYG | | GSYT | | EDAL | |
| | CRASQDIAGSL | | | | | | PT | | SGFTFSSYGMSW | | | | | | DY | |
| | NWLQQKPGK | | | | | | | | VRQAPGKGLEW | | | | | | | |
| | AIKRLIYATSS | | | | | | | | VATITSGGSYTY | | | | | | | |
| | LDSGVPKRFS | | | | | | | | YVDSVKGRFTIS | | | | | | | |
| | GSRSGSDYTL | | | | | | | | RDNAKNTLYLQ | | | | | | | |
| | TISSLQPEDFA | | | | | | | | MNSLRAEDTAV | | | | | | | |
| | TYYCLQYGSF | | | | | | | | YYCVRIGEDALD | | | | | | | |
| | PPTFGQGTKV | | | | | | | | YWGQGTLVTVSS | | | | | | | |
| | EIK | | | | | | | | | | | | | | | |
| VEGFR2 | DIQMTQSPSSV | 1857 | QGID | 1858 | DAS | 1859 | QQA | 1860 | EVQLVQSGGGLV | 1861 | GFTF | 1862 | ISSS | 1863 | ARVT | 1864 |
| | SASIGDRVTIT | | NW | | | | KAFP | | KPGGSLRLSCAA | | SSYS | | SSYI | | DAFD | |
| | CRASQGIDNW | | | | | | PT | | SGFTFSSYSMNW | | | | | | I | |
| | LGWYQQKPG | | | | | | | | VRQAPGKGLEW | | | | | | | |
| | KAPKLLIYDAS | | | | | | | | VSSISSSSSYIYY | | | | | | | |
| | NLDTGVPSRFS | | | | | | | | ADSVKGRFTISR | | | | | | | |
| | GSGSGTYFTLT | | | | | | | | DNAKNSLYLQM | | | | | | | |
| | ISSLQAEDFAV | | | | | | | | NSLRAEDTAVYY | | | | | | | |
| | YFCQQAKAFP | | | | | | | | CARVTDAFDIWG | | | | | | | |
| | PTFGGGTKVDI | | | | | | | | QGTMVTVSS | | | | | | | |
| | K | | | | | | | | | | | | | | | |
| VSIR | DIQMTQSPSSL | 1865 | QSID | 1866 | SAS | 1867 | QQS | 1868 | QVQLVQSGAEV | 1869 | GGTF | 1870 | IIPI | 1871 | ARSS | 1872 |
| | SASVGDRVTIT | | TR | | | | AYN | | KKPGSSVKVSCK | | SSYA | | FGTA | | YGWS | |
| | CRASQSIDTRL | | | | | | PIT | | ASGGTFSSYAIS | | | | | | YEFD | |
| | NWYQQKPGK | | | | | | | | WVRQAPGQGLE | | | | | | Y | |
| | APKLLIYSASS | | | | | | | | WMGGIIPIFGTAN | | | | | | | |
| | LQSGVPSRFSG | | | | | | | | YAQKFQGRVTIT | | | | | | | |
| | SGSGTDFTLTI | | | | | | | | ADESTSTAYMEL | | | | | | | |
| | SSLQPEDFATY | | | | | | | | SSLRSEDTAVYY | | | | | | | |
| | YCQQSAYNPI | | | | | | | | CARSSYGWSYEF | | | | | | | |
| | TFGQGTKVEI | | | | | | | | DYWGQGTLVTV | | | | | | | |
| | K | | | | | | | | SS | | | | | | | |
| CD171 | DIVMSQSPSSL | 1873 | QSLL | 1874 | WAS | 1875 | QQY | 1876 | QVQLQQPGDELV | 1877 | GYTF | 1878 | INPS | 1879 | ALYD | 1880 |
| (L1CAM) | AVSVGEKVTM | | YSSN | | | | HSYP | | KPGASVKLSCKA | | TSY | | NGRT | | GYYA | |
| | SCKSSQSLLYS | | QKNY | | | | FT | | SGYTFTSYWMQ | | W | | | | MDY | |
| | SNQKNYLAW | | | | | | | | WVKQRPGQGLE | | | | | | | |
| | YQQKPGQSPK | | | | | | | | WIGEINPSNGRTN | | | | | | | |
| | LLIYWASTRES | | | | | | | | YNEMFKSKATLT | | | | | | | |
| | GVPDRFTGSG | | | | | | | | VDKSSSTAYMQL | | | | | | | |
| | SGTDFTLTISS | | | | | | | | SSLTSEDSAVYY | | | | | | | |
| | VKAEDLALYY | | | | | | | | CALYDGYYAMD | | | | | | | |
| | CQQYHSYPFT | | | | | | | | YWGQGTSVTVSS | | | | | | | |
| | FGSGTKLEIK | | | | | | | | | | | | | | | |
| CD171 | DIQMTQSSSSF | 1881 | EDIN | 1882 | GAT | 1883 | QQY | 1884 | QVQLQQPGAELV | 1885 | GYTF | 1886 | INPS | 1887 | ARDY | 1888 |
| (L1CAM) | SVSLGDRVTIT | | NR | | | | WSTP | | KPGASVKLSCKA | | TGY | | NGRT | | YGTS | |
| | CKANEDINNR | | | | | | FT | | SGYTFTGYWMH | | W | | | | YNFD | |
| | LAWYQQTPG | | | | | | | | WVKQRPGHGLE | | | | | | Y | |
| | NSPRLLISGAT | | | | | | | | WIGEINPSNGRTN | | | | | | | |
| | NLVTGVPSRFS | | | | | | | | YNERFKSKATLT | | | | | | | |
| | GSGSGKDYTL | | | | | | | | VDKSSTTAFMQL | | | | | | | |
| | TITSLQAEDFA | | | | | | | | SGLTSEDSAVYF | | | | | | | |
| | TYYCQQYWST | | | | | | | | CARDYYGTSYNF | | | | | | | |
| | PFTFGSGTELE | | | | | | | | DYWGQGTTLTV | | | | | | | |
| | IK | | | | | | | | SS | | | | | | | |
| CD19 | EIVLTQSPAIM | 1889 | SGVN | 1890 | DTS | 1891 | HQR | 1892 | QVQLVQPGAEV | 1893 | GYTF | 1894 | IDPS | 1895 | ARGS | 1896 |
| | SASPGERVTM | | Y | | | | GSYT | | VKPGASVKLSCK | | TSN | | DSYT | | NPYY | |
| | TCSASSGVNY | | | | | | | | TSGYTFTSNWMH | | W | | | | YAMD | |
| | MHWYQQKPG | | | | | | | | WVKQAPGQGLE | | | | | | Y | |
| | TSPRRWIYDTS | | | | | | | | WIGEIDPSDSYTN | | | | | | | |
| | KLASGVPARF | | | | | | | | YNQNFQGKAKL | | | | | | | |
| | SGSGSGTSYSL | | | | | | | | TVDKSTSTAYME | | | | | | | |
| | TISSMEPEDAA | | | | | | | | VSSLRSDDTAVY | | | | | | | |
| | TYYCHQRGSY | | | | | | | | YCARGSNPYYYA | | | | | | | |
| | TFGGGTKLEIK | | | | | | | | MDYWGQGTSVT | | | | | | | |
| | | | | | | | | | VSS | | | | | | | |
| CD28 | DIQMTQSPSSL | 1897 | QNIY | 1898 | KAS | 1899 | QQG | 1900 | QVQLVQSGAEV | 1901 | GYTF | 1902 | IYPG | 1903 | TRSH | 1904 |
| | SASVGDRVTIT | | VW | | | | QTYP | | KKPGASVKVSCK | | TSYY | | NVNT | | YGLD | |
| | CHASQNIYVW | | | | | | YT | | ASGYTFTSYYIH | | | | | | WNFD | |
| | LNWYQQKPG | | | | | | | | WVRQAPGQGLE | | | | | | V | |
| | KAPKLLIYKAS | | | | | | | | WIGCIYPGNVNT | | | | | | | |
| | NLHTGVPSRFS | | | | | | | | NYNEKFKDRATL | | | | | | | |
| | GSGSGTDFTLT | | | | | | | | TVDTSISTAYME | | | | | | | |
| | ISSLQPEDFAT | | | | | | | | LSRLRSDDTAVY | | | | | | | |
| | YYCQQGQTYP | | | | | | | | FCTRSHYGLDWN | | | | | | | |
| | YTFGGGTKVE | | | | | | | | FDVWGQGTTVT | | | | | | | |
| | IK | | | | | | | | VSS | | | | | | | |
| CD4 | DIQMTQSPSSL | 1905 | QDIN | 1906 | HTS | 1907 | IQYN | 1908 | EVILVESGGAIVE | 1909 | GFTF | 1910 | ISDH | 1911 | ARKY | 1912 |
| | SASLGGKVTIA | | NY | | | | DLFL | | PGGSLKLSCSAS | | SNY | | STNT | | GGDY | |
| | CKASQDINNYI | | | | | | TT | | GFTFSNYAMSW | | A | | | | DPED | |
| | AWYQHKPGK | | | | | | | | VRQTPEKRLEWV | | | | | | Y | |
| | GPRLLIYHTST | | | | | | | | AAISDHSTNTYY | | | | | | | |
| | LQPGIPSRFSG | | | | | | | | PDSVKGRFTISRD | | | | | | | |
| | SGSGRDYSFSI | | | | | | | | NAKNTLYLQMN | | | | | | | |
| | SNLEPEDIATY | | | | | | | | SLRSEDTAIYYCA | | | | | | | |
| | YCIQYNDLFLT | | | | | | | | RKYGGDYDPED | | | | | | | |
| | TFGGGTKLEIK | | | | | | | | YWGQGTTLTVSS | | | | | | | |
| CD47 | DVLMTQTPLS | 1913 | QSIV | 1914 | KVS | 1915 | FQGS | 1916 | QVQLQQPGAELV | 1917 | GYTF | 1918 | IYPG | 1919 | ARGG | 1920 |
| | LPVSLGDQASI | | YSNG | | | | HVP | | KPGASVMMSCK | | TNY | | NDDT | | YRAM | |
| | SCRSSQSIVYS | | NTY | | | | YT | | ASGYTFTNYNM | | DYN | | | | | |
| | NGNTYLGWY | | | | | | | | HWVKQTPGQGL | | | | | | | |
| | LQKPGQSPKL | | | | | | | | EWIGTIYPGNDD | | | | | | | |
| | LIYKVSNRFSG | | | | | | | | TSYNQKFKDKAT | | | | | | | |
| | VPDRFSGSGS | | | | | | | | LTADKSSSAAYM | | | | | | | |
| | GTDFTLKISRV | | | | | | | | QLSSLTSEDSAV | | | | | | | |
| | EAEDLGVYHC | | | | | | | | YYCARGGYRAM | | | | | | | |
| | FQGSHVPYTF | | | | | | | | DYWGQGTSVTV | | | | | | | |
| | GGGTKVEIK | | | | | | | | SS | | | | | | | |
| CD8 | DVQINQSPSFL | 1921 | RSIS | 1922 | SGS | 1923 | QQH | 1924 | QVQLQQSGAELV | 1925 | GFNI | 1926 | IDPA | 1927 | GRGY | 1928 |
| | AASPGETITNC | | QY | | | | NENP | | KPGASVKLSCTA | | KDT | | NDNT | | GYYV | |
| | RTSRSISQYLA | | | | | | LT | | SGFNIKDTYIHFV | | Y | | | | FDH | |
| | WYQEKPGKT | | | | | | | | RQRPEQGLEWIG | | | | | | | |
| | NKLLIYSGSTL | | | | | | | | RIDPANDNTLYA | | | | | | | |
| | QSGIPSRFSGS | | | | | | | | SKFQGKATITAD | | | | | | | |
| | GSGTDFTLTIS | | | | | | | | TSSNTAYMHLCS | | | | | | | |
| | GLEPEDFAMY | | | | | | | | LTSGDTAVYYCG | | | | | | | |
| | YCQQHNENPL | | | | | | | | RGYGYYVFDHW | | | | | | | |
| | TFGAGTKLEL | | | | | | | | GQGTTLTVSS | | | | | | | |
| | K | | | | | | | | | | | | | | | |
| KIR2DL | EIVLTQSPVTL | 1929 | QSVS | 1930 | DAS | 1931 | QQRS | 1932 | QVQLVQSGAEV | 1933 | GGTF | 1934 | FIPI | 1935 | ARIP | 1936 |
| 2 | SLSPGERATLS | | SY | | | | NWM | | KKPGSSVKVSCK | | SFYA | | FGAA | | SGSY | |
| | CRASQSVSSY | | | | | | YT | | ASGGTFSFYAIS | | | | | | YYDY | |
| | LAWYQQKPG | | | | | | | | WVRQAPGQGLE | | | | | | DMDV | |
| | QAPRLLIYDAS | | | | | | | | WMGGFIPIFGAA | | | | | | | |
| | NRATGIPARFS | | | | | | | | NYAQKFQGRVTI | | | | | | | |
| | GSGSGTDFTLT | | | | | | | | TADESTSTAYME | | | | | | | |
| | ISSLEPEDFAV | | | | | | | | LSSLRSDDTAVY | | | | | | | |
| | YYCQQRSNW | | | | | | | | YCARIPSGSYYY | | | | | | | |
| | MYTFGQGTKL | | | | | | | | DYDMDVWGQGT | | | | | | | |
| | EIK | | | | | | | | TVTVSS | | | | | | | |
| pMHC | QSELTQPRSVS | 1937 | SRDV | 1938 | DVI | 1939 | WSF | 1940 | EVQLLESGGGLV | 1941 | GFTF | 1942 | IVSS | 1943 | AGEL | 1944 |
| [NY- | GSPGQSVTISC | | GGYN | | | | AGS | | QPGGSLRLSCAA | | STYQ | | GGST | | LPYY | |
| ESO1] | TGTSRDVGGY | | Y | | | | YYV | | SGFTFSTYQMSW | | | | | | GMDV | |
| | NYVSWYQQH | | | | | | | | VRQAPGKGLEW | | | | | | | |
| | PGKAPKLIIHD | | | | | | | | VSGIVSSGGSTAY | | | | | | | |
| | VIERSSGVPDR | | | | | | | | ADSVKGRFTISR | | | | | | | |
| | FSGSKSGNTAS | | | | | | | | DNSKNTLYLQM | | | | | | | |
| | LTISGLQAEDE | | | | | | | | NSLRAEDTAVYY | | | | | | | |
| | ADYYCWSFA | | | | | | | | CAGELLPYYGM | | | | | | | |
| | GSYYVFGTGT | | | | | | | | DVWGQGTTVTV | | | | | | | |
| | DVTVL | | | | | | | | SS | | | | | | | |
| pMHC | QSVLTQPPSVS | 1945 | SSNI | 1946 | GNS | 1947 | QSY | 1948 | EVQLQQSGAEVK | 1949 | GGTF | 1950 | IIPI | 1951 | ARDV | 1952 |
| [MART1] | GAPGQRVTISC | | GAGY | | | | DNSL | | KPGSSVKVSCKA | | SSYA | | LGIA | | GSGS | |
| | TGSSSNIGAGY | | D | | | | SSW | | SGGTFSSYAISW | | | | | | YSLD | |
| | DVHWYQQLP | | | | | | V | | VRQAPGQGLEW | | | | | | Y | |
| | GTAPKLLIYG | | | | | | | | MGRIIPILGIANY | | | | | | | |
| | NSNRPSGVPD | | | | | | | | AQKFQGRVTITA | | | | | | | |
| | RFSGSKSGTSA | | | | | | | | DKSTSAYMELSS | | | | | | | |
| | SLAITGLQAED | | | | | | | | LRSEDTAVYYCA | | | | | | | |
| | EADYYCQSYD | | | | | | | | RDVGSGSYSLDY | | | | | | | |
| | NSLSSWVFGG | | | | | | | | WGQGTLVTVSS | | | | | | | |
| | GTKLTVL | | | | | | | | | | | | | | | |
| pMHC | SYVLTQPPSVS | 1953 | NIGS | 1954 | DDS | 1955 | QVW | 1956 | EVQLVESGGGLV | 1957 | GFTF | 1958 | ISWN | 1959 | ARGR | 1960 |
| [MAGEA1] | VAPGQTARIT | | RS | | | | DSRT | | QPGRSLRLSCAA | | DDY | | SGSI | | GFHY | |
| | CGGNNIGSRS | | | | | | DHW | | SGFTFDDYAMH | | A | | | | YYYG | |
| | VHWYQQKPG | | | | | | V | | WVRQAPGKGLE | | | | | | MDI | |
| | QAPVLVVYDD | | | | | | | | WVSGISWNSGSI | | | | | | | |
| | SDRPSGIPERF | | | | | | | | GYADSVKGRFTI | | | | | | | |
| | SGSNSGNMAT | | | | | | | | SRDNAKNSLYLQ | | | | | | | |
| | LTISRVEAGDE | | | | | | | | MNSLRAEDTAV | | | | | | | |
| | ADYYCQVWD | | | | | | | | YYCARGRGFHY | | | | | | | |
| | SRTDHWVFGG | | | | | | | | YYYGMDIWGQG | | | | | | | |
| | GTDLTVL | | | | | | | | TTVTVSS | | | | | | | |
| pMHC | EVILTQSPLSL | 1961 | QSLL | 1962 | LGS | 1963 | MQA | 1964 | EVQLVESGGGVV | 1965 | GFTF | 1966 | ISYD | 1967 | ARGG | 1968 |
| [Tyrosi- | PVTPGEPASIS | | HSIG | | | | LQTP | | QPGRSLRLSCAA | | RSY | | G | | GYYE | |
| nase] | CRSSQSLLHSI | | YN | | | | LT | | SGFTFRSYGMHW | | G | | SNK | | TSGP | |
| | GYNYLDWYL | | | | | | | | VRQAPGKGLEW | | | | | | DY | |
| | QKPGQSPQLLI | | | | | | | | VAVISYDGSNKY | | | | | | | |
| | YLGSNRASGV | | | | | | | | YTDSVNGRFTISR | | | | | | | |
| | PDRFSGSGSGT | | | | | | | | DNSKNTLYQMN | | | | | | | |
| | DFTLKISRVEA | | | | | | | | SLRAEDTAVYYC | | | | | | | |
| | EDVGVYYCM | | | | | | | | ARGGGYYETSGP | | | | | | | |
| | QALQTPLTFG | | | | | | | | DYWGQGTLVTV | | | | | | | |
| | GGTKVEIK | | | | | | | | SS | | | | | | | |
| pMHC | DVVMTQSPLS | 1969 | QSLL | 1970 | LGS | 1971 | MQT | 1972 | EVQLVETGGGVV | 1973 | GFTF | 1974 | ISYD | 1975 | AKDR | 1976 |
| [Tyrosi- | PVTPGEPASIS | | HSNG | | | | LQTP | | QPGRSLRLSCAA | | SSYG | | GSNK | | YGWG | |
| nase] | CRSSQSLLHSN | | HNY | | | | LT | | SGFTFSSYGMHW | | | | | | SSFG | |
| | GHNYLDWYL | | | | | | | | VRQAPGKGLEW | | | | | | HDY | |
| | QKPGQSQLLIY | | | | | | | | VAVISYDGSNKY | | | | | | | |
| | LGSNRSGVPD | | | | | | | | YADSVKGRFTIS | | | | | | | |
| | RFSGSGSGTDF | | | | | | | | DNSKNTLYLQM | | | | | | | |
| | TLKISRVEAED | | | | | | | | NSLRAEDTAVYY | | | | | | | |
| | VGVYYCMQT | | | | | | | | CAKDRYGWGSS | | | | | | | |
| | LQTPLTFGPGT | | | | | | | | FGHDYWGQGTL | | | | | | | |
| | KVDIK | | | | | | | | TVSS | | | | | | | |
| pMHC | QSVLTQPPSVS | 1977 | SSNI | 1978 | DNN | 1979 | GTW | 1980 | EVQLVQSGAEVK | 1981 | GYTF | 1982 | INPS | 1983 | ARDG | 1984 |
| [gp100] | AAPGQTVTISC | | GRNY | | | | DSTL | | KPGASVKVSCKA | | TSYY | | GGST | | TYGS | |
| | SGSSSNIGRNY | | | | | | DLY | | SGYTFTSYYIHW | | | | | | GSYP | |
| | VSWFQQVPGR | | | | | | V | | VRQAPGQGLEW | | | | | | YYYY | |
| | APKLLIYDNN | | | | | | | | MGAINPSGGSTP | | | | | | YGMD | |
| | QRPSGIPGRFS | | | | | | | | YAQKFQGRVTM | | | | | | V | |
| | ASKSDTSATL | | | | | | | | TRDTSTSTVYME | | | | | | | |
| | DITGLQSGDE | | | | | | | | LSSLRSEDTAVY | | | | | | | |
| | AVYYCGTWD | | | | | | | | YCARDGTYGSGS | | | | | | | |
| | STLDLYVFGG | | | | | | | | YPYYYYYGMDV | | | | | | | |
| | GTHVPVL | | | | | | | | WGQGTTVTVSS | | | | | | | |
| pMHC | ETTLTQSPGTL | 1985 | ASQS | 1986 | IYGA | 1987 | YCQ | 1988 | EVQLVQSGAEVK | 1989 | GGTF | 1990 | IIPI | 1991 | ARGP | 1992 |
| [MUC1] | SLSLSPGERAT | | VSS | | | | QYG | | KPGSSVKVSCKA | | SSYA | | FGTA | | EYCI | |
| | LSCRASQSVSS | | | | | | SSPR | | SGGTFSSYAISW | | | | | | NGVC | |
| | SYLAWYQQKP | | | | | | T | | VRQAPGQGLEW | | | | | | SLDV | |
| | GQAPRLLIYG | | | | | | | | MGGIIPIFGTANY | | | | | | | |
| | ASSRATGIPDR | | | | | | | | AQKFQGRVTITA | | | | | | | |
| | FSGSGSGTDFT | | | | | | | | DESTSTAYMELS | | | | | | | |
| | LTISRLEPEDF | | | | | | | | SLRSEDTAVYYC | | | | | | | |
| | AVYYCQQYGS | | | | | | | | ARGPEYCINGVC | | | | | | | |
| | SPRTFGQQGT | | | | | | | | SLDVWGQGTTV | | | | | | | |
| | KVEIK | | | | | | | | TVSS | | | | | | | |
| pMHC | EIVMTQSPATL | 1993 | QSVS | 1994 | DAS | 1995 | HQY | 1996 | EVQLVQSGAEVK | 1997 | GGTF | 1998 | IIPI | 1999 | AVHY | 2000 |
| [MUC1] | SLSPGERATLS | | SY | | | | GSSP | | KPGSSVKVSCKA | | SSYA | | FGTA | | GDYV | |
| | CRASQSVSSY | | | | | | QT | | SGGTFSSYAISW | | | | | | FSSM | |
| | LAWYQQKPG | | | | | | | | VRQAPGQGLEW | | | | | | DV | |
| | QAPRLLIYDAS | | | | | | | | MGGIIPIFGTANY | | | | | | | |
| | NRATGIPARFS | | | | | | | | AQKFQGRVTITA | | | | | | | |
| | GSGSGTDFTLT | | | | | | | | DESTSTAYMELS | | | | | | | |
| | ISSLEPEDFAV | | | | | | | | SLRSEDTAVYYC | | | | | | | |
| | YYCHQYGSSP | | | | | | | | AVHYGDYVFSS | | | | | | | |
| | QTFGQGTKVE | | | | | | | | MDVWGQGTTVT | | | | | | | |
| | IK | | | | | | | | VSS | | | | | | | |
| pMHC | EIVLTQSPATL | 2001 | QSVG | 2002 | DAS | 2003 | QQRS | 2004 | EVQLVQSGAEVK | 2005 | GGTF | 2006 | IIPI | 2007 | YCAG | 2008 |
| [tax] | SLSPGERATLS | | SY | | | | NWP | | KPGSSVKVSCKA | | SSYT | | FGTA | | DTDS | |
| | CRASQSVGSY | | | | | | PMY | | SGGTFSSYTISWV | | | | | | SGYY | |
| | LAWYQQKPG | | | | | | T | | RQAPGQGLEWM | | | | | | GAVD | |
| | XAPRLLIYDAS | | | | | | | | GGIIPIFGTANYA | | | | | | Y | |
| | HRATGIPARFS | | | | | | | | QKFQGRVTITAD | | | | | | | |
| | GSGSGTDFTLT | | | | | | | | KSTSTSTAYMEL | | | | | | | |
| | ISSLEPEDFAV | | | | | | | | SSLRSEDTAVYY | | | | | | | |
| | YYCQQRSNWP | | | | | | | | CAGDTDSSGYYG | | | | | | | |
| | PMYTFGQGTK | | | | | | | | AVDYWGQGTLV | | | | | | | |
| | LEIK | | | | | | | | TVSS | | | | | | | |
| pMHC | NFMLTQPHSV | 2009 | GGSI | 2010 | EDN | 2011 | QSSD | 2012 | EVQLVQSGGGV | 2013 | GFTF | 2014 | ISYD | 2015 | AKTL | 2016 |
| [gp100] | SESPGKTVTIS | | DNNY | | | | GSK | | VQPGRSLTLSCA | | SSYG | | GSNK | | SAGE | |
| | CTGSGGSIDN | | | | | | VV | | ASGFTFSSYGMH | | | | | | WIGG | |
| | NYVHWYQQR | | | | | | | | WVRQAPGKGLE | | | | | | GAFD | |
| | PGSAPTTVMF | | | | | | | | WVSVISYDGSNK | | | | | | I | |
| | EDNQRPSGVP | | | | | | | | YYADSVKGRFTI | | | | | | | |
| | DRFSGSIDSSS | | | | | | | | SRDNSKNTLYLM | | | | | | | |
| | NSASLVISGLK | | | | | | | | NSLRTEDTAVYY | | | | | | | |
| | TEDEGDYYCQ | | | | | | | | CAKTLSAGEWIG | | | | | | | |
| | SSDGSKVVFG | | | | | | | | GGAFDIWGHGT | | | | | | | |
| | GGTKLTVL | | | | | | | | MVTVSS | | | | | | | |
| pMHC | DIVMTQSPDSL | 2017 | QSLL | 2018 | WAS | 2019 | QQY | 2020 | QVQLQESGPGLV | 2021 | GGSI | 2022 | ISDS | 2023 | ARVR | 2024 |
| [NY- | AVSLGERVTIN | | YTSN | | | | YKSP | | KPSQTLALTCSVI | | SSGD | | GST | | IQGA | |
| ESO1] | CKSSQSLLYTS | | NRNY | | | | L | | GGSISSGDYYWS | | YY | | | | SWGF | |
| | NNRNYLAWY | | | | | | | | WIRQPPGKGLEW | | | | | | FDL | |
| | QLKPGQPPKL | | | | | | | | VGYISDSGSTYN | | | | | | | |
| | LIYWASTRES | | | | | | | | EPSLNSRVTISVD | | | | | | | |
| | GVPDRFSGSG | | | | | | | | TSKNQFSLKLFS | | | | | | | |
| | SGTDFTLTISG | | | | | | | | MTAADTAVYYC | | | | | | | |
| | LQAEDVAVYY | | | | | | | | ARVRIQGASWGF | | | | | | | |
| | CQQYYKSPLF | | | | | | | | FDLWGRGTLVSV | | | | | | | |
| | GQGTKLEIK | | | | | | | | SS | | | | | | | |
| pMHC | EIVMTQSPATL | 2025 | QSFS | 2026 | AAS | 2027 | QQY | 2028 | QVQLVQSGVEV | 2029 | GYTF | 2030 | ISVY | 2031 | AREG | 2032 |
| [NY- | SVSPGERATLS | | DD | | | | NNW | | KKPGASVKVSCK | | ASY | | NGKT | | GFYG | |
| ESO1] | CRASQSFSDD | | | | | | PQT | | ASGYTFASYGIS | | G | | | | SGSH | |
| | LAWYQQKPG | | | | | | | | WVRQAPGQGLE | | | | | | YRYF | |
| | QAPRLLIYAAS | | | | | | | | WMGWISVYNGK | | | | | | AMDV | |
| | TRATGIPARFS | | | | | | | | TNPAERHLGRVT | | | | | | | |
| | GRGSGTEFTLT | | | | | | | | MTTDTSTNTAY | | | | | | | |
| | ISSLQSEDSAV | | | | | | | | MELRNLKSDDTA | | | | | | | |
| | YYCQQYNNW | | | | | | | | VYYCAREGGFY | | | | | | | |
| | PQTFGQGTKV | | | | | | | | GSGSHYRYFAM | | | | | | | |
| | EIK | | | | | | | | DVWGQGTTVIVS | | | | | | | |
| | | | | | | | | | S | | | | | | | |
| pMHC | DIVMTQTPLSL | 2033 | QSLV | 2034 | KVS | 2035 | MQG | 2036 | QVQLVQSGGGV | 2037 | GFSF | 2038 | MNWS | 2039 | ARGE | 2040 |
| [NY- | PVTLGQPASLS | | FTDG | | | | THW | | VRPGGSLRLSCA | | IDYG | | GDKK | | YSNR | |
| ESO1] | CRSSQSLVFTD | | NTY | | | | PPI | | ASGFSFIDYGMS | | | | | | | |
| | GNTYLNWFQ | | | | | | | | WVRQVPGKGLE | | | | | | | |
| | QRPGQSPRRLI | | | | | | | | WVAGMNWSGD | | | | | | | |
| | YKVSSRDPGV | | | | | | | | KKGHAESVKGRF | | | | | | | |
| | PDRFSGTGSGT | | | | | | | | IISRDNAKNTLYL | | | | | | | |
| | DFTLEISRVEA | | | | | | | | EMSSLRVEDTAL | | | | | | | |
| | EDIGVYYCMQ | | | | | | | | YFCARGEYSNRF | | | | | | | |
| | GTHWPPIFGQ | | | | | | | | DPRGRGTLVTVS | | | | | | | |
| | GTKVEIK | | | | | | | | S | | | | | | | |
| pMHC | EIVLTQSPGTL | 2041 | QSVS | 2042 | GAS | 2043 | QHY | 2044 | EVQLQESGPGLV | 2045 | GGSI | 2046 | IYPR | 2047 | AREY | 2048 |
| [NY- | SLSPGERATLS | | SSY | | | | DNSL | | KPSETLSLTCTVS | | SSDY | | GTS | | YYVT | |
| ESO1] | CRASQSVSSSY | | | | | | ITFG | | GGSISSDYWTWI | | | | | | NGYF | |
| | LGWYQQKPG | | | | | | HGT | | RQPAGKGLEWIG | | | | | | SPGF | |
| | QAPRLLIYGAS | | | | | | R | | RIYPRGTSNYNPS | | | | | | DY | |
| | IRATGIPDRFS | | | | | | | | LKSRVTMSVDTS | | | | | | | |
| | GSGSGTDFTLT | | | | | | | | KNQISLRLSSVTA | | | | | | | |
| | ISRLEPDDFAV | | | | | | | | ADTAVYYCARE | | | | | | | |
| | YYCQHYDNSL | | | | | | | | YYYVTNGYFSPG | | | | | | | |
| | ITFGHGTRLDI | | | | | | | | FDYWGQGTLVT | | | | | | | |
| | K | | | | | | | | VSS | | | | | | | |
| pMHC | DIVMTQSPLSL | 2049 | QSLH | 2050 | LVS | 2051 | MQA | 2052 | EVQLVESGGGVV | 2053 | GFIF | 2054 | ISSD | 2055 | GTGH | 2056 |
| [NY- | PVTPGEPASIS | | SNGY | | | | VQTP | | QPGKSLRLSCAA | | SSFA | | GSNE | | STEY | |
| ESO1] | CRSSQSLHSN | | NY | | | | FT | | SGFIFSSFAVHWV | | | | | | YDGL | |
| | GYNYLDWYL | | | | | | | | RQAPGKGLEWV | | | | | | LGV | |
| | QKPGQSPQLLI | | | | | | | | ATISSDGSNEDY | | | | | | | |
| | YLVSNRASGV | | | | | | | | VDSVKGRFIISRD | | | | | | | |
| | PDRFSGTGSGT | | | | | | | | NSKNTLYLQMNS | | | | | | | |
| | DFTLKISRVEA | | | | | | | | LRRDDTAVYYC | | | | | | | |
| | EDVGVYYCM | | | | | | | | GTGHSTEYYDGL | | | | | | | |
| | QAVQTPFTFG | | | | | | | | LGVWGHGTTVS | | | | | | | |
| | PGTKVDIK | | | | | | | | VSS | | | | | | | |
| pMHC | QSVVTQPPSVS | 2057 | SSNI | 2058 | EDD | 2059 | ATW | 2060 | QLQLQESGPGLV | 2061 | GGSI | 2062 | IYYS | 2063 | ARHV | 2064 |
| [MARTI] | AAPGRKVTISC | | GSNY | | | | DRT | | KPSETLSLTCTVS | | SSSS | | GT | | GHEL | |
| | SGSSSNIGSNY | | | | | | VNV | | GGSISSSSYYWG | | YY | | | | DY | |
| | VSWYQQVPGT | | | | | | VR | | WIRQPPGKGLEW | | | | | | | |
| | APKLLIYEDD | | | | | | | | GSIYYSGTYYNPS | | | | | | | |
| | KRPSGIPDRFS | | | | | | | | LKSRVTISVDTSK | | | | | | | |
| | GSKGTSATLGI | | | | | | | | NQFSLKLSSTAA | | | | | | | |
| | TGLQTGDEAD | | | | | | | | DTAVYYCARHV | | | | | | | |
| | YFCATWDRTV | | | | | | | | GHELDYWGQGT | | | | | | | |
| | NVVRFGGGTR | | | | | | | | LVTVSS | | | | | | | |
| | LTV | | | | | | | | | | | | | | | |
| pMHC | DVVMTQSPLS | 2065 | QSLL | 2066 | LGS | 2067 | MQA | 2068 | QLQLQESGPGLV | 2069 | GGSI | 2070 | IYHS | 2071 | VGSP | 2072 |
| [Tyrosi- | LPVTPGEPASI | | HSIG | | | | LQTP | | KPSGTLSLTCAVS | | SSSN | | GST | | YGDY | |
| nase] | SCRSSQSLLHS | | YNY | | | | PT | | GGSISSSNWWSW | | W | | | | VLDY | |
| | IGYNYLHWFL | | | | | | | | VRQPPGKGLEWI | | | | | | | |
| | QKGQSPQLLIY | | | | | | | | GEIYHSGSTNYN | | | | | | | |
| | LGSNRASGVP | | | | | | | | PSLKSRVTISDKS | | | | | | | |
| | DRFSGSGSGT | | | | | | | | KNQFSLKLSSVT | | | | | | | |
| | DFTLKISRVEA | | | | | | | | AADTAVYYCVG | | | | | | | |
| | EDVGVYYCM | | | | | | | | SPYGDYVLDYW | | | | | | | |
| | QALQTPPTFG | | | | | | | | GQGTLVTVSS | | | | | | | |
| | QGTRLEIK | | | | | | | | | | | | | | | |
| pMHC | QAVVTQPPSA | 2073 | SSNI | 2074 | SNN | 2075 | AAW | 2076 | QMQLVQSGAEV | 2077 | GYSF | 2078 | VDPG | 2079 | ARVQ | 2080 |
| [WT-1] | SGTPGQRVTIS | | GSNT | | | | DDSL | | KEPGESLRISCKG | | TNF | | YSYS | | YSGY | |
| | CSGSSSNIGSN | | | | | | NGW | | SGYSFTNFWISW | | W | | | | YDWF | |
| | TVNWYQQVP | | | | | | V | | VRQMPGKGLEW | | | | | | DP | |
| | GTAPKLLIYSN | | | | | | | | MGRVDPGYSYST | | | | | | | |
| | NQRPSGVPDR | | | | | | | | YSPSFQGHVTISA | | | | | | | |
| | FSGSKSGTSAS | | | | | | | | DKSTSTAYLQWN | | | | | | | |
| | LAISGLQSEDE | | | | | | | | SLKASDTAMYYC | | | | | | | |
| | ADYYCAAWD | | | | | | | | ARVQYSGYYDW | | | | | | | |
| | DSLNGWVFGG | | | | | | | | FDPWGQGTLVTV | | | | | | | |
| | GTKLTVL | | | | | | | | SS | | | | | | | |
| pMHC | DIVMTQSQKF | 2081 | QNVH | 2082 | LAS | 2083 | LQH | 2084 | QVQLKESGPGLV | 2085 | GFSL | 2086 | IWGD | 2087 | ARDP | 2088 |
| [EBNA-1] | MSTSVGDRVS | | TA | | | | WNN | | APSQSLSITCTVS | | TGY | | GST | | YGYI | |
| | ITCKASQNVH | | | | | | PLT | | GFSLTGYGVNW | | G | | | | FDY | |
| | TAVAWYQQK | | | | | | | | VRQPPGKGLEWL | | | | | | | |
| | AGQSPKALIYL | | | | | | | | GMIWGDGSTDY | | | | | | | |
| | ASNRHTGVPD | | | | | | | | NSALKSRLSISKD | | | | | | | |
| | RFTGSGSGTDF | | | | | | | | NSKSQVFLKMNS | | | | | | | |
| | TLTISNVQSED | | | | | | | | LQTDDTARYYCA | | | | | | | |
| | LADYFCLQHW | | | | | | | | RDPYGYIFDYWG | | | | | | | |
| | NNPLTFGAGT | | | | | | | | QGTTLTVSS | | | | | | | |
| | KLELK | | | | | | | | | | | | | | | |
| pMHC | DIVMTQSQKF | 2089 | QNVF | 2090 | STS | 2091 | QQYI | 2092 | QVQLKQSGPGLV | 2093 | GFSL | 2094 | IWSG | 2095 | ARNW | 2096 |
| [LMP2] | MSTSVGDRVS | | TN | | | | SYPL | | QPSQSLSITCTVS | | TNY | | GST | | VPYY | |
| | VTCRASQNVF | | | | | | T | | GFSLTNYGVHW | | G | | | | FDY | |
| | TNVAWYQQK | | | | | | | | VRQSPGKGLEwl | | | | | | | |
| | PGQAPKALIYS | | | | | | | | GVIWSGGSTDYN | | | | | | | |
| | TSYRYSGVPD | | | | | | | | AAFISRLSISKDN | | | | | | | |
| | RFTGSGSGTDF | | | | | | | | SKQVFFKMNSLQ | | | | | | | |
| | TLTISNVQSED | | | | | | | | ANDTAIYYCARN | | | | | | | |
| | LAEYFCQQYIS | | | | | | | | WVPYYFDYWGQ | | | | | | | |
| | YPLTFGAGTK | | | | | | | | GTTLTVSS | | | | | | | |
| | LELK | | | | | | | | | | | | | | | |
| pMHC | ETTLTQSPGTL | 2097 | QSVS | 2098 | AAS | 2099 | QQY | 2100 | QVQLQESGGGLV | 2101 | GFTF | 2102 | ISSS | 2103 | VRGD | 2104 |
| [gp100] | SLSPGERATLS | | SNY | | | | GSSR | | KPGGSLRLSCAA | | SSYS | | GSTI | | PYFF | |
| | CRASQSVSSN | | | | | | S | | SGFTFSSYSMNW | | | | | | YYYG | |
| | YLAWYQQKP | | | | | | | | VRQAPGKGLEW | | | | | | MDI | |
| | GQAPRLLIYA | | | | | | | | VSYISSSGSTIYY | | | | | | | |
| | ASSRATGIPDR | | | | | | | | ADSVRGRFTISRD | | | | | | | |
| | FSGSGSGTDFT | | | | | | | | NAKNTLYLQMN | | | | | | | |
| | LTISRLEPEDF | | | | | | | | SLRAEDTAVYYC | | | | | | | |
| | AVYYCQQYGS | | | | | | | | VRGDPYFFYYYG | | | | | | | |
| | SRSFGQGTKL | | | | | | | | MDIWGQGTTVT | | | | | | | |
| | EIK | | | | | | | | VSS | | | | | | | |
| pMHC | DIQLTQSPSSL | 2105 | QSIS | 2106 | SAS | 2107 | QQS | 2108 | QVQLQESGPGLV | 2109 | GGSI | 2110 | IDYS | 2111 | ARES | 2112 |
| [gp100] | SASVGDRVIIT | | TH | | | | YSSP | | KPSETLSLTCTVS | | SSN | | GST | | GSPY | |
| | CRATQSISTHL | | | | | | PIT | | GGSISSNMYYWG | | MYY | | | | YFDY | |
| | NWYQQKPGK | | | | | | | | WVRQPPGKGLE | | | | | | | |
| | APKLLIYSASS | | | | | | | | WIGSIDYSGSTYY | | | | | | | |
| | LQSGVPSRFSG | | | | | | | | NPSLRSRVTMSV | | | | | | | |
| | SGSGSTDFTLT | | | | | | | | DTSKKQFSLKMT | | | | | | | |
| | ISSLQPEDFAT | | | | | | | | SVTAADTAVYYC | | | | | | | |
| | YYCQQSYSSP | | | | | | | | ARESGSPYYFDY | | | | | | | |
| | PITFGQGTRLE | | | | | | | | WGQGTLVTVSS | | | | | | | |
| | IK | | | | | | | | | | | | | | | |
| pMHC | ETTLTQSPGTL | 2113 | QSVS | 2114 | GAS | 2115 | QQY | 2116 | QVQLQESGPGLV | 2117 | GGSI | 2118 | WINH | 2119 | ARVV | 2120 |
| [hTERT] | SLSPGERATLS | | SSY | | | | GTSL | | KPSETLSLTCTVS | | SSSS | | SGST | | AAAG | |
| | CRASQSVSSSY | | | | | | TWY | | GGSISSSSYYWA | | YY | | | | HYYY | |
| | LAWYQQKPG | | | | | | | | WIRQPPGKLEWI | | | | | | YYMD | |
| | QAPRLLIYGAS | | | | | | | | GEWINHSGSTNY | | | | | | V | |
| | TRATGVPDRF | | | | | | | | NPSLKSRVTISVD | | | | | | | |
| | SGSGSGTDFTL | | | | | | | | TSKNQFSLNLNS | | | | | | | |
| | ISRLEPEDFAV | | | | | | | | VTAADTAVYYC | | | | | | | |
| | YYCQQYGTSL | | | | | | | | ARVVAAAGHYY | | | | | | | |
| | TWYFGQGTK | | | | | | | | YYYMDVWGKGT | | | | | | | |
| | VEIK | | | | | | | | TVTVSS | | | | | | | |
| pMHC | ETTLTQSPGTL | 2121 | QSVS | 2122 | GAS | 2123 | QQY | 2124 | QVQLQESGPGLV | 2125 | GGSI | 2126 | IYYS | 2127 | ARSR | 2128 |
| [hTERT] | SLSPGERATLS | | SRY | | | | GSSN | | KPSETLSLTCTVS | | SSSY | | GST | | SGSY | |
| | CRASQSVSSR | | | | | | T | | GGSISSSYYWGW | | Y | | | | LNDA | |
| | YLAWYQQKP | | | | | | | | IRQPPGKGLEWIG | | | | | | FDI | |
| | GQAPRLLIYG | | | | | | | | SIYYSGSTYYNPS | | | | | | | |
| | ASSRATGIPDR | | | | | | | | LKSRVTISVDTSK | | | | | | | |
| | FSGSGSGTDFT | | | | | | | | NQFSLKLSSVTA | | | | | | | |
| | LTISRLEPEDF | | | | | | | | ADTAVYYCARSR | | | | | | | |
| | AVYYCQQYGS | | | | | | | | SGSYLNDAFDIW | | | | | | | |
| | SNTFGQGTKL | | | | | | | | GQGTMVTVSS | | | | | | | |
| | EIK | | | | | | | | | | | | | | | |
| pMHC | ETTLTQSPGTL | 2129 | QSVS | 2130 | GAS | 2131 | QQY | 2132 | QVQLQQSGAEV | 2133 | GGTF | 2134 | IIPI | 2135 | ARGF | 2136 |
| [hTERT] | SLSPGERATLS | | SSY | | | | GSSS | | KKPGSSVKVSCK | | SSYA | | LGIA | | RPYY | |
| | CRASQSVSSSY | | | | | | GT | | ASGGTFSSYAIS | | | | | | YYGM | |
| | LAWYQQKPG | | | | | | | | WVRQAPGQGLE | | | | | | DV | |
| | QAPRLLIYGAS | | | | | | | | WMGRIIPILGIAN | | | | | | | |
| | SRATGIPDRFS | | | | | | | | YAQKFQGRVTIT | | | | | | | |
| | GSGSGTDFTLT | | | | | | | | ADKSTSTAYMEL | | | | | | | |
| | ISRLEPEDFAV | | | | | | | | SSLRSEDTAVYY | | | | | | | |
| | YYCQQYGSSS | | | | | | | | CARGFRPYYYYG | | | | | | | |
| | GTFGQGTKVE | | | | | | | | MDVWGQGTTVT | | | | | | | |
| | IK | | | | | | | | VSS | | | | | | | |
| pMHC | QSVVTQPPSVS | 2137 | SSNI | 2138 | GNS | 2139 | QSY | 2140 | QVQLQQSGPGLV | 2141 | GGSI | 2142 | MYYS | 2143 | ARIP | 2144 |
| [gp100] | GAPGQRVTISC | | GAGY | | | | DSSL | | KPSETLSLTCTVS | | RNY | | GGA | | NYYD | |
| | TGSSSNIGAGY | | D | | | | SAL | | GGSIRNYYWSWI | | Y | | | | RSGY | |
| | DVHWYQQLP | | | | | | | | RQPPGKGLEWIG | | | | | | YPGY | |
| | GTAPKLLIYG | | | | | | | | YMYYSGGANYN | | | | | | WYFD | |
| | NSNRPSGVPD | | | | | | | | PSLNSRVTISLDT | | | | | | L | |
| | RFSGSKSGTSA | | | | | | | | SKNQFSLKLTSV | | | | | | | |
| | SLAITGLQAED | | | | | | | | TAADTAVYYCA | | | | | | | |
| | EADYYCQSYD | | | | | | | | RIPNYYDRSGYY | | | | | | | |
| | SSLSALFGGGT | | | | | | | | PGYWYFDLWGR | | | | | | | |
| | KLTVL | | | | | | | | GTLVTVSS | | | | | | | |
| pMHC | DIQLTQSPSSL | 2145 | QSIS | 2146 | SAS | 2147 | QQS | 2148 | QVQLQQSGPGLV | 2149 | GDSI | 2150 | TYYR | 2151 | ARAS | 2152 |
| [gp100] | SASVGDRVTIT | | TY | | | | DIIP | | KPSQTLSLTCAIS | | SSNS | | SKWY | | FGTS | |
| | CRASQSISTYL | | | | | | LT | | GDSISSNSVVWN | | VV | | N | | GKFD | |
| | NWYQHRPGK | | | | | | | | WIRQSPSRGLEW | | | | | | D | |
| | APKLLIYSASS | | | | | | | | LGRTYYRSKWY | | | | | | | |
| | LQSGVPSRFSG | | | | | | | | NDYAVSVKSRITI | | | | | | | |
| | SGSGTDFTLTI | | | | | | | | NPDTSKNQFSLQ | | | | | | | |
| | SSLQPEDFATY | | | | | | | | LNSVTPDDTALY | | | | | | | |
| | YCQQSDIIPLT | | | | | | | | YCARASFGTSGK | | | | | | | |
| | FGGGTKVEIN | | | | | | | | FDDWGQGTLVT | | | | | | | |
| | | | | | | | | | VSS | | | | | | | |
| pMHC | SYVLTQPPSVS | 2153 | TIGR | 2154 | DDT | 2155 | QVW | 2156 | QVQLQQSGPGLV | 2157 | GDS | 2158 | TYYR | 2159 | CVRG | 2160 |
| [hTERT] | EAPGKTARITC | | KS | | | | DSST | | KPSQTLSLTCAIS | | VSSK | | SKWY | | SIFD | |
| | EGITIGRKSVH | | | | | | DPQ | | GDSVSSKNSSWN | | NSS | | Y | | V | |
| | WYQQKPGQA | | | | | | VV | | WIRQSPSRGLEW | | | | | | | |
| | PVLVVYDDTV | | | | | | | | LGRTYYRSKWY | | | | | | | |
| | RPSGVPERFSG | | | | | | | | YDYAVSVKGRIT | | | | | | | |
| | SNSGNTATLII | | | | | | | | FTFPDTSKNQVSL | | | | | | | |
| | SGVEAGDEAD | | | | | | | | HLNAVTPEDTAM | | | | | | | |
| | YCQVWDSSTD | | | | | | | | YYCVRGSIFDVW | | | | | | | |
| | PQVVFGGGTK | | | | | | | | GQGTMVTVSS | | | | | | | |
| | TVL | | | | | | | | | | | | | | | |
| pMHC | NFMLTQPHSV | 2161 | GGSI | 2162 | EDD | 2163 | QSY | 2164 | QVQLQQWGAGL | 2165 | GGSF | 2166 | INHS | 2167 | ARMV | 2168 |
| [hTERT] | SESPGKTVTIS | | ATNY | | | | DSSN | | LKPSETLSLTCAV | | SGY | | GST | | RYYY | |
| | CTGSGGSIATN | | | | | | QV | | YGGSFSGYYWS | | Y | | | | GMDV | |
| | YVQWYQQRP | | | | | | | | WIRQPPGKGLEW | | | | | | | |
| | GSAPATVIYED | | | | | | | | IGEINHSGSTNYN | | | | | | | |
| | DQRPSGVPDR | | | | | | | | PSLKSRVTISVDT | | | | | | | |
| | FSGSIDSSSNS | | | | | | | | SKNQFSLKLSSVT | | | | | | | |
| | ASLTISGLKTE | | | | | | | | AADTAVYYCAR | | | | | | | |
| | DEADYYCQSY | | | | | | | | MVRYYYGMDV | | | | | | | |
| | DSSNQVFGGG | | | | | | | | WGQGTTVTVSS | | | | | | | |
| | TKLTVL | | | | | | | | | | | | | | | |
| pMHC | ETTLTQSPGTL | 2169 | QSVG | 2170 | GAS | 2171 | QQY | 2172 | QVQLQQWGAGL | 2173 | GGSF | 2174 | INHS | 2175 | ARVA | 2176 |
| [hTERT] | SLSPGERATLS | | SN | | | | GDSP | | LKPSETLSLTCAV | | SGY | | GST | | YYDS | |
| | CRASQSVGSN | | | | | | RLYT | | YGGSFSGYYWS | | Y | | | | SGYY | |
| | LAWYQQRPG | | | | | | | | WIRQPPGKGLEW | | | | | | PYDA | |
| | QAPSLLIYGAS | | | | | | | | IGEINHSGSTNYN | | | | | | FDI | |
| | SRATGVPDRF | | | | | | | | PSLKSRVTISVDT | | | | | | | |
| | SGSGSGTDFTL | | | | | | | | SKNQFSLKLSSVT | | | | | | | |
| | TISRLEPEDFA | | | | | | | | AADTAVYYCAR | | | | | | | |
| | VYYCQQYGDS | | | | | | | | VAYYDSSGYYPY | | | | | | | |
| | PRLYTFGQGT | | | | | | | | DAFDIWGQGTM | | | | | | | |
| | KLEIK | | | | | | | | VTVSS | | | | | | | |
| pMHC | DVVMTQSPGT | 2177 | QLSD | 2178 | SAS | 2179 | HQY | 2180 | QVQLVQSGAEV | 2181 | GYTF | 2182 | ISSS | 2183 | ARYD | 2184 |
| [gp100] | LSVSPGDSATL | | SY | | | | GFLP | | KKPGASVKVSCK | | TRY | | NGYT | | ISGL | |
| | SCWASQLSDS | | | | | | WT | | ASGYTFTRYGIS | | G | | | | DGFD | |
| | YVSWYQQKP | | | | | | | | WVRQAPGQGLE | | | | | | I | |
| | GQAPRLLIHSA | | | | | | | | WMGWISSSNGY | | | | | | | |
| | SIRAPGIPDRFS | | | | | | | | TKYAQNLQGRLT | | | | | | | |
| | GSVSGTEFTLT | | | | | | | | LTTDTSTGTAYM | | | | | | | |
| | ISGLEPEDFAV | | | | | | | | ELRSLRSEDTAL | | | | | | | |
| | YSCHQYGFLP | | | | | | | | YYCARYDISGLD | | | | | | | |
| | WTFGQGTKVE | | | | | | | | GFDIWGQGTMV | | | | | | | |
| | IR | | | | | | | | TVSS | | | | | | | |
| pMHC | ETTLTQSPGTL | 2185 | RYIN | 2186 | DAS | 2187 | QQY | 2188 | QVQLVQSGAEV | 2189 | GGTF | 2190 | IIPI | 2191 | CARD | 2192 |
| [gp100] | SLSPGERATLS | | ANF | | | | GSSP | | KKPGSSVKVSCK | | SSYA | | FGTA | | SSGW | |
| | CRASRYINAN | | | | | | RT | | ASGGTFSSYAIS | | | | | | LYDA | |
| | FLAWYQQKPG | | | | | | | | WVRQAPGQGLE | | | | | | FDI | |
| | QAPRLLIYDAS | | | | | | | | WMGGIIPIFGTAT | | | | | | | |
| | TRATGIPDRFS | | | | | | | | NYAQKFQGRVTI | | | | | | | |
| | GSGSGTDFTLT | | | | | | | | TADESTSTAYME | | | | | | | |
| | ISRLEPEDFAV | | | | | | | | LSSLRSEDTAVY | | | | | | | |
| | YYCQQYGSSP | | | | | | | | YCARDSSGWLY | | | | | | | |
| | RTFGQGTKVEI | | | | | | | | DAFDIWGQGTM | | | | | | | |
| | K | | | | | | | | VTVSS | | | | | | | |
| pMHC | DIQMTQSPSIL | 2193 | QRFG | 2194 | GAS | 2195 | QQA | 2196 | QVQLVQSGAEV | 2197 | GGTF | 2198 | INVG | 2199 | ARDG | 2200 |
| [hTERT] | SASVGDRVTIT | | DY | | | | NSFP | | KKPGSSVKVSCK | | SSYA | | NGNA | | ERAW | |
| | CRASQRFGDY | | | | | | ITFG | | ASGGTFSSYAIS | | | | | | DLDY | |
| | LAWYQQKPG | | | | | | KGT | | WVRQAPGQGLE | | | | | | | |
| | QAPKLLIYGAS | | | | | | R | | WMGWINVGNGN | | | | | | | |
| | TLQSGVPSRFS | | | | | | | | AIYSQKFQGRVTI | | | | | | | |
| | GSGSGTEFTLT | | | | | | | | TRDTSATTAYME | | | | | | | |
| | ISGLQPEDFAT | | | | | | | | LSSLRSEDTAVY | | | | | | | |
| | YYCQQANSFPI | | | | | | | | YCARDGERAWD | | | | | | | |
| | TFGKGTRLDIR | | | | | | | | LDYWGQGTLVT | | | | | | | |
| | | | | | | | | | VSS | | | | | | | |
| pMHC | ETTLTQSPGTL | 2201 | QSVS | 2202 | GAS | 2203 | QQY | 2204 | QVQLVQSGGGV | 2205 | GFTF | 2206 | ISYD | 2207 | AREL | 2208 |
| [hTERT] | SLSPGERATLS | | SSY | | | | GSSP | | VQPGRSLRLSCA | | SSYA | | GSNK | | RFLE | |
| | CRASQSVSSSY | | | | | | YT | | ASGFTFSSYAMH | | | | | | WSSD | |
| | LAWYQQKPG | | | | | | | | WVRQAPGKGLE | | | | | | AFDI | |
| | QAPRLLIYGAS | | | | | | | | WVAVISYDGSNK | | | | | | | |
| | SRATGIPDRFS | | | | | | | | YYADSVKGRFTI | | | | | | | |
| | GSGSGTDFTLT | | | | | | | | SRDNSKNTLYLQ | | | | | | | |
| | ISRLEPEDFAV | | | | | | | | MNSLRAEDTAV | | | | | | | |
| | YYCQQYGSSP | | | | | | | | YYCARELRFLEW | | | | | | | |
| | YTFGQGTKLEI | | | | | | | | SSDAFDIWGQGT | | | | | | | |
| | K | | | | | | | | MVTVSS | | | | | | | |
| pMHC | ETTLTQSPGTL | 2209 | QSVS | 2210 | GAS | 2211 | QQH | 2212 | QVQLVQSGGGV | 2213 | GFTF | 2214 | ISYD | 2215 | AKDS | 2216 |
| [gp100] | SLSPGERATLS | | SSY | | | | DSSP | | VQPGRSLRLSCA | | SSYG | | GSDK | | YYDN | |
| | CRASQSVSSSY | | | | | | RT | | ASGFTFSSYGMH | | | | | | SAFQ | |
| | LAWYQQKPG | | | | | | | | WVRQAPGKGLE | | | | | | AD | |
| | QAPRLLIYGAS | | | | | | | | WVAFISYDGSDK | | | | | | | |
| | SRATGIPDRFS | | | | | | | | NFADSVKGRFTIS | | | | | | | |
| | GSGSGTDFTLT | | | | | | | | RDNSKNTLYLQ | | | | | | | |
| | ISRLEPEDFAV | | | | | | | | MNSLRAEDTAV | | | | | | | |
| | YYCQQHDSSP | | | | | | | | YYCAKDSYYDN | | | | | | | |
| | RTFGQGTKVEI | | | | | | | | SAFQADWGQGT | | | | | | | |
| | K | | | | | | | | LVTVSS | | | | | | | |
| pMHC | EIVLTQSPLSL | 2217 | QSLL | 2218 | LGS | 2219 | MQA | 2220 | QVQLVQSGGGV | 2221 | GFTF | 2222 | ISYD | 2223 | ARDF | 2224 |
| [tax] | PVTPGEPASIS | | HSNG | | | | LQTP | | VQPGRSLRLSCA | | SSYG | | GSNK | | DYGD | |
| | CRSSQSLLHSN | | YNY | | | | RT | | ASGFTFSSYGMH | | | | | | SYYY | |
| | GYNYLDWYL | | | | | | | | WVRQAPGKGLE | | | | | | YGMD | |
| | QKPGQSPQLLI | | | | | | | | WVAVISYDGSNK | | | | | | V | |
| | YLGSNRASGV | | | | | | | | YYADSVKGRFTI | | | | | | | |
| | PDRFSGSGSGT | | | | | | | | SRDNSKNTLYLQ | | | | | | | |
| | DFTLKISRVEA | | | | | | | | MNSLRAEDTAV | | | | | | | |
| | EDVGVYYCM | | | | | | | | YYCARDFDYGDS | | | | | | | |
| | QALQTPRTFG | | | | | | | | YYYYGMDVWG | | | | | | | |
| | QGTKVEIK | | | | | | | | QGTTVTVSS | | | | | | | |
| pMHC | DVMTQSPLSL | 2225 | QSLL | 2226 | FGS | 2227 | MQA | 2228 | QVQLVQSGGGV | 2229 | GFTF | 2230 | ISYD | 2231 | ARDY | 2232 |
| [gp100] | PVTPGEPASIS | | HSNG | | | | THW | | VQPGRSLRLSCA | | SSYG | | GSNK | | YGDY | |
| | CRSSQSLLHSN | | YKY | | | | PYT | | ASGFTFSSYGMH | | | | | | ALLD | |
| | GYKYVNWYL | | | | | | | | WVRQAPGKGLE | | | | | | Y | |
| | QKPGQSPQLLI | | | | | | | | WVAVISYDGSNK | | | | | | | |
| | YFGSYRASGV | | | | | | | | YYADSVKGRFTI | | | | | | | |
| | PDRFSGSGSGT | | | | | | | | SRDNSKNTLYLQ | | | | | | | |
| | DFTLKISRVEA | | | | | | | | MNSLRAEDTAV | | | | | | | |
| | EDVGIYYCMQ | | | | | | | | YYCARDYYGDY | | | | | | | |
| | ATHWPYTFGQ | | | | | | | | ALLDYWGQGTL | | | | | | | |
| | GTRLEIK | | | | | | | | VTVSS | | | | | | | |
| pMHC | EIVLTQSPDTL | 2233 | SQSV | 2234 | YDT | 2235 | CQQ | 2236 | QVQLVQSGGGV | 2237 | GFTF | 2238 | ISYD | 2239 | AKTV | 2240 |
| [gp100] | SLSPGEREATL | | SHS | | | | YVSS | | VQPGRSLRLSCA | | STYG | | GSNK | | GVTF | |
| | SCRASQSVSHS | | | | | | PLT | | ASGFTFSTYGLH | | | | | | VSDA | |
| | YLAQYQQKPG | | | | | | | | WVRQAPGKGLE | | | | | | FDI | |
| | QAPRLLIYDTS | | | | | | | | WVAFISYDGSNK | | | | | | | |
| | SRATDIPDRFS | | | | | | | | YYADSVKGRFTI | | | | | | | |
| | GSGSGTDFTLT | | | | | | | | SRDNSKNTLYLQ | | | | | | | |
| | ISRLEPEDSAV | | | | | | | | MNGLRAEDTAV | | | | | | | |
| | YYCQQYVSSP | | | | | | | | YYCAKTVGVTFV | | | | | | | |
| | LTFGQGTKLEI | | | | | | | | SDAFDIWGQGTM | | | | | | | |
| | K | | | | | | | | VTVSS | | | | | | | |
| pMHC | QSELTQPRSVS | 2241 | SRDV | 2242 | DVI | 2243 | WSF | 2244 | QVQLLESGGGLV | 2245 | GFTF | 2246 | IGSS | 2247 | AGEL | 2248 |
| [NY- | GSPGQSVTISC | | GGYN | | | | AGS | | QPGGSLRLSCAA | | SAY | | GGGT | | LPYY | |
| ESO1] | TGTSRDVGGY | | Y | | | | YYV | | SGFTFSAYGMG | | G | | | | GMDV | |
| | NYVSWYQQH | | | | | | | | WVRQAPGKGLE | | | | | | | |
| | PGKAPKLIIHD | | | | | | | | WVSSIGSSGGGT | | | | | | | |
| | VIIRPSGVPDR | | | | | | | | AYADSVKGRFTI | | | | | | | |
| | FSGSKSGNTAS | | | | | | | | SRDNSKNTLYLQ | | | | | | | |
| | LTISGLQAEDE | | | | | | | | MNSLRAEDTAV | | | | | | | |
| | AHYYCWSFA | | | | | | | | YYCAGELLPYYG | | | | | | | |
| | GSYYVFGTGT | | | | | | | | MDVWGQGTTVT | | | | | | | |
| | DVTVL | | | | | | | | VSS | | | | | | | |
| GD2 | ENVLTQSPAI | 2249 | SSVS | 2250 | STS | 2251 | QQY | 2252 | QVQLKESGPVLV | 2253 | GFSL | 2254 | IWAG | 2255 | AKRS | 2256 |
| | MSASPGEKVT | | SSL | | | | SGYP | | APSQTLSITCTVS | | ASY | | GST | | DDYS | |
| | MTCRASSSVS | | | | | | IT | | GFSLASYNIHWV | | N | | | | WFAY | |
| | SSLYHWYQQK | | | | | | | | RQPPGKGLEWLG | | | | | | | |
| | SGASPKVWIY | | | | | | | | VIWAGGSTNYNS | | | | | | | |
| | STSNLASGVP | | | | | | | | ALMSRLSISKDNS | | | | | | | |
| | GRFSGSGSGTS | | | | | | | | KSQVFLQMNSLQ | | | | | | | |
| | YSLTISSVEAE | | | | | | | | TDDTAMYYCAK | | | | | | | |
| | DAATYYCQQ | | | | | | | | RSDDYSWFAYW | | | | | | | |
| | YSGYPITFGAG | | | | | | | | GCQTLVTVSA | | | | | | | |
| | TKVEVK | | | | | | | | | | | | | | | |
| STEAP_ | DIVMSQSPSSL | 2257 | QSLL | 2258 | WAS | 2259 | QQY | 2260 | DVQVQESGPGLV | 2261 | GYSI | 2262 | ISNS | 2263 | ARER | 2264 |
| 1 | AVSVGEKVTM | | YRSN | | | | YNY | | KPSQSLSLTCTVT | | TSDY | | GST | | NYDY | |
| | SCKSSQSLLYR | | QKNY | | | | PRT | | GYSITSDYAWN | | A | | | | DDYY | |
| | SNQKNYLAW | | | | | | | | WIRQFPGNKLEW | | | | | | YAMD | |
| | YQQKPGQSPK | | | | | | | | MGYISNSGSTSY | | | | | | Y | |
| | LLIYWASTRES | | | | | | | | NPSLKSRISITRDT | | | | | | | |
| | GVPDRFTGSG | | | | | | | | SKNQFFLQLISVT | | | | | | | |
| | SGTDFTLTISS | | | | | | | | TEDTATYYCARE | | | | | | | |
| | VKAEDLAVYY | | | | | | | | RNYDYDDYYYA | | | | | | | |
| | CQQYYNYPRT | | | | | | | | MDYWGQGTTLT | | | | | | | |
| | FGGGTKLEIK | | | | | | | | VSA | | | | | | | |
| a4b7 | DIQMTQSPSSV | 2265 | QGIS | 2266 | GAS | 2267 | QQA | 2268 | QVQLVQSGAEV | 2269 | GYT | 2270 | FDPQ | 2271 | ATGS | 2272 |
| | SASVGDRVTIT | | SW | | | | NSFP | | KKPGASVKVSCK | | LSDL | | DGET | | SSSW | |
| | CRASQGISSW | | | | | | WT | | VSGYTLSDLSIH | | S | | | | FDP | |
| | LAWYQQKPG | | | | | | | | WVRQAPGKGLE | | | | | | | |
| | KAPKLLIYGAS | | | | | | | | WMGGFDPQDGE | | | | | | | |
| | NLESGVPSRFS | | | | | | | | TIYAQKFQGRVT | | | | | | | |
| | GSGSGTDFTLT | | | | | | | | MTEDTSTDTAY | | | | | | | |
| | ISSLQPEDFAN | | | | | | | | MELSSLKSEDTA | | | | | | | |
| | YYCQQANSFP | | | | | | | | VYYCATGSSSSW | | | | | | | |
| | WTFGQGTKVE | | | | | | | | FDPWGQGTLVTV | | | | | | | |
| | IK | | | | | | | | SS | | | | | | | |
| GPC3 | DVVMTQSPLS | 2273 | QSLV | 2274 | KVS | 2275 | SQNT | 2276 | QVQLVQSGAEV | 2277 | GYTF | 2278 | LDPK | 2279 | TRFY | 2280 |
| | LPVTPGEPASI | | HSNR | | | | HVPP | | KKPGASVKVSCK | | TDY | | TGDT | | SYTY | |
| | SCRSSQSLVHS | | NTY | | | | T | | ASGYTFTDYEMH | | E | | | | W | |
| | NRNTYLHWY | | | | | | | | WVRQAPGQGLE | | | | | | | |
| | LQKPGQSPQL | | | | | | | | WMGALDPKTGD | | | | | | | |
| | LIYKVSNRFSG | | | | | | | | TAYSQKFKGRVT | | | | | | | |
| | VPDRFSGSGS | | | | | | | | LTADKSTSTAYM | | | | | | | |
| | GTDFTLKISRV | | | | | | | | ELSSLTSEDTAVY | | | | | | | |
| | EAEDVGVYYC | | | | | | | | YCTRFYSYTYWG | | | | | | | |
| | SQNTHVPPTF | | | | | | | | QGTLVTVSS | | | | | | | |
| | GQGTKLEIK | | | | | | | | | | | | | | | |
| CD262 | SELTQDPAVS | 2281 | SLRS | 2282 | GAN | 2283 | NSA | 2284 | EVQLVQSGGGVE | 2285 | GFTF | 2286 | INWQ | 2287 | AKIL | 2288 |
| (DR5) | VALGQTVRIT | | YY | | | | DSSG | | RPGGSLRLSCAA | | DDY | | GGST | | GAGR | |
| | CSGDSLRSYY | | | | | | NHV | | SGFTFDDYAMS | | A | | | | GWYF | |
| | ASWYQQKPG | | | | | | V | | WVRQAPGKGLE | | | | | | DY | |
| | QAPVLVIYGA | | | | | | | | WVSGINWQGGS | | | | | | | |
| | NNRPSGIPDRF | | | | | | | | TGYADSVKGRVT | | | | | | | |
| | SGSSSGNTASL | | | | | | | | ISRDNAKNSLYL | | | | | | | |
| | TITGAQAEDE | | | | | | | | QMNSLRAEDTA | | | | | | | |
| | ADYYCNSADS | | | | | | | | VYYCAKILGAGR | | | | | | | |
| | SGNHVVFGGG | | | | | | | | GWYFDYWGKGT | | | | | | | |
| | TKLTVL | | | | | | | | TVTVSS | | | | | | | |
| CD80 | ESALTQPPSVS | 2289 | TSNI | 2290 | DIN | 2291 | QSY | 2292 | QVQLQESGPGLV | 2293 | GGSI | 2294 | FYSS | 2295 | VRDR | 2296 |
| | GAPGQKVTIS | | GGYD | | | | DSSL | | KPSETLSLTCAVS | | SGG | | SGNT | | LFSV | |
| | CTGSTSNIGGY | | | | | | NAQ | | GGSISGGYGWG | | YG | | | | VGMV | |
| | DLHWYQQLP | | | | | | VFG | | WIRQPPGKGLEW | | | | | | YNNW | |
| | GTAPKLLIYDI | | | | | | G | | IGSFYSSSGNTYY | | | | | | FDVW | |
| | NKRPSGISDRF | | | | | | | | NPSLKSQVTISTD | | | | | | | |
| | SGSKSGTAAS | | | | | | | | TSKNQFSLKLNS | | | | | | | |
| | LAITGLQTEDE | | | | | | | | MTAADTAVYYC | | | | | | | |
| | ADYYCQSYDS | | | | | | | | VRDRLFSVVGM | | | | | | | |
| | SLNAQVFGGG | | | | | | | | VYNNWFDVWGP | | | | | | | |
| | TRLTVL | | | | | | | | GVLVTVSS | | | | | | | |
| CD22 | DVQVTQSPSS | 2297 | QSLA | 2298 | GIS | 2299 | LQGT | 2300 | EVQLVQSGAEVK | 2301 | GYR | 2302 | INPG | 2303 | TREG | 2304 |
| | LSASVGDRVTI | | NSYG | | | | HQP | | KPGASVKVSCKA | | FTNY | | NNYA | | YGNY | |
| | TCRSSQSLANS | | NTF | | | | YT | | SGYRFTNYWIHW | | W | | | | GAWF | |
| | YGNTFLSWYL | | | | | | | | VRQAPGQGLEWI | | | | | | AY | |
| | HKPGKAPQLLI | | | | | | | | GGINPGNNYATY | | | | | | | |
| | YGISNRFSGVP | | | | | | | | RRKFQGRVTMT | | | | | | | |
| | DRFSGSGSGT | | | | | | | | ADTSTSTVYMEL | | | | | | | |
| | DFTLTISSLQP | | | | | | | | SSLRSEDTAVYY | | | | | | | |
| | EDFATYYCLQ | | | | | | | | CTREGYGNYGA | | | | | | | |
| | GTHQPYTFGQ | | | | | | | | WFAYWGQGTLV | | | | | | | |
| | GTKVEIK | | | | | | | | TVSS | | | | | | | |
| CD23 | DIQMTQSPSSL | 2305 | QDIR | 2306 | VAS | 2307 | LQV | 2308 | EVQLVESGGGLA | 2309 | GFRF | 2310 | ISSS | 2311 | ASLT | 2312 |
| | SASVGDRVTIT | | YY | | | | YSTP | | KPGGSLRLSCAA | | TFNN | | GDPT | | TGSD | |
| | CRASQDIRYY | | | | | | RT | | SGFRFTFNNYYM | | YY | | | | SW | |
| | LNWYQQKPG | | | | | | | | DWVRQAPGQGL | | | | | | | |
| | KAPKLLIYVAS | | | | | | | | EWVSRISSSGDPT | | | | | | | |
| | SLQSGVPSRFS | | | | | | | | WYADSVKGRFTI | | | | | | | |
| | GSGSGTEFTLT | | | | | | | | SRENANNTLFLQ | | | | | | | |
| | VSSLQPEDFAT | | | | | | | | MNSLRAEDTAV | | | | | | | |
| | YYCLQVYSTP | | | | | | | | YYCASLTTGSDS | | | | | | | |
| | RTFGQGTKVEI | | | | | | | | WGQGVLVTVSS | | | | | | | |
| | K | | | | | | | | | | | | | | | |
| CD20 | DIQMTQSPSSL | 2313 | SSVS | 2314 | APS | 2315 | QQW | 2316 | EVQLVESGGGLV | 2317 | GYTF | 2318 | IYPG | 2319 | ARVV | 2320 |
| | SASVGDRVTIT | | Y | | | | SFNP | | QPGGSLRLSCAA | | TSYN | | NGDT | | YYSN | |
| | CRASSSVSYM | | | | | | PT | | SGYTFTSYNMH | | | | | | SYWY | |
| | HWYQQKPGK | | | | | | | | WVRQAPGKGLE | | | | | | FDV | |
| | APKPLIYAPSN | | | | | | | | WVGAIYPGNGDT | | | | | | | |
| | LASGVPSRFSG | | | | | | | | SYNQKFKGRFTIS | | | | | | | |
| | SGSGTDFTLTI | | | | | | | | VDKSKNTLYLQ | | | | | | | |
| | SSLQPEDFATY | | | | | | | | MNSLRAEDTAV | | | | | | | |
| | YCQQWSFNPP | | | | | | | | YYCARVVYYSNS | | | | | | | |
| | TFGQGTKVEI | | | | | | | | YWYFDVWGQGT | | | | | | | |
| | K | | | | | | | | LVTVSS | | | | | | | |
| CD37 | EIVLTQSPATL | 2321 | ENVY | 2322 | FAK | 2323 | QHH | 2324 | EVQLVQSGAEVK | 2325 | GYSF | 2326 | IDPY | 2327 | ARSV | 2328 |
| | SLSPGERATLS | | SY | | | | SDNP | | KPGESLKISCKGS | | TGY | | YGGT | | GPFD | |
| | CRASENVYSY | | | | | | WT | | GYSFTGYNMNW | | N | | | | S | |
| | LAWYQQKPG | | | | | | | | VRQMPGKGLEW | | | | | | | |
| | QAPRLLIYFAK | | | | | | | | MGNIDPYYGGTT | | | | | | | |
| | TLAEGIPARFS | | | | | | | | YNRKFKGQVTIS | | | | | | | |
| | GSGSGTDFTLT | | | | | | | | ADKSISTAYLQW | | | | | | | |
| | ISSLEPEDFAV | | | | | | | | SSLKASDTAMYY | | | | | | | |
| | YYCQHHSDNP | | | | | | | | CARSVGPFDSWG | | | | | | | |
| | WTFGQGTKVE | | | | | | | | QGTLVTVSS | | | | | | | |
| | IK | | | | | | | | | | | | | | | |
| CD22 | DIQMTQSPSSL | 2329 | QSIV | 2330 | KVS | 2331 | FQGS | 2332 | EVQLVESGGGLV | 2333 | GYEF | 2334 | IYPGD | 2335 | ARDGS | 2336 |
| | SASVGDRVTIT | | HSVG | | | | QFPY | | QPGGSLRLSCAA | | SRS | | GDT | | SWDW | |
| | CRSSQSIVHSV | | NTF | | | | T | | SGYEFSRSWMN | | W | | | | YFDV | |
| | GNTFLEWYQQ | | | | | | | | WVRQAPGKGLE | | | | | | | |
| | KPGKAPKLLIY | | | | | | | | WVGRIYPGDGDT | | | | | | | |
| | KVSNRFSGVP | | | | | | | | NYSGKFKGRFTIS | | | | | | | |
| | SRFSGSGSGTD | | | | | | | | ADTSKNTAYLQ | | | | | | | |
| | FTLTISSLQPE | | | | | | | | MNSLRAEDTAV | | | | | | | |
| | DFATYYCFQG | | | | | | | | YYCARDGSSWD | | | | | | | |
| | SQFPYTFGQG | | | | | | | | WYFDVWGQGTL | | | | | | | |
| | TKVEIK | | | | | | | | VTVSS | | | | | | | |
| fibro- | EIVLTQSPGTL | 2337 | QSVS | 2338 | YAS | 2339 | QQT | 2340 | EVQLLESGGGLV | 2341 | GFTF | 2342 | ISGS | 2343 | AKPF | 2344 |
| nectin | SLSPGERATLS | | SSF | | | | GRIP | | QPGGSLRLSCAA | | SSFS | | SGTT | | PYFD | |
| extra | CRASQSVSSSF | | | | | | PT | | SGFTFSSFSMSW | | | | | | Y | |
| domain- | LAWYQQKPG | | | | | | | | VRQAPGKGLEW | | | | | | | |
| B | QAPRLLIYYAS | | | | | | | | VSSISGSSGTTYY | | | | | | | |
| | SRATGIPDRFS | | | | | | | | ADSVKGRFTISR | | | | | | | |
| | GSGSGTDFTLT | | | | | | | | DNSKNTLYLQM | | | | | | | |
| | ISRLEPEDFAV | | | | | | | | NSLRAEDTAVYY | | | | | | | |
| | YYCQQTGRIPP | | | | | | | | CAKPFPYFDYWG | | | | | | | |
| | TFGQGTKVEI | | | | | | | | QGTLVTVSS | | | | | | | |
| | K | | | | | | | | | | | | | | | |
| CD3 | DIQMTQSPSSL | 2345 | SSVS | 2346 | DTS | 2347 | QQW | 2348 | QVQLVQSGAEV | 2349 | GYTF | 2350 | INPR | 2351 | ARSAY | 2352 |
| | SASVGDRVTIT | | Y | | | | SSNP | | KKPGASVKVSCK | | ISYT | | SGYT | | YDYDG | |
| | CSASSSVSYM | | | | | | PT | | ASGYTFISYTMH | | | | | | FAY | |
| | NWYQQKPGK | | | | | | | | WVRQAPGQGLE | | | | | | | |
| | APKRLIYDTSK | | | | | | | | WMGYINPRSGYT | | | | | | | |
| | LASGVPSRFSG | | | | | | | | HYNQKLKDKAT | | | | | | | |
| | SGSGTDFTLTI | | | | | | | | LTADKSASTAYM | | | | | | | |
| | SSLQPEDFATY | | | | | | | | ELSSLRSEDTAV | | | | | | | |
| | YCQQWSSNPP | | | | | | | | YYCARSAYYDY | | | | | | | |
| | TFGGGTKVEI | | | | | | | | DGFAYWGQGTL | | | | | | | |
| | K | | | | | | | | VTVSS | | | | | | | |

*Italics means immune cell target/payload (scFv arm)

[0127] In one aspect, the present disclosure provides a heterodimeric multispecific antibody comprising a first polypeptide chain, a second polypeptide chain, a third polypeptide chain and a fourth polypeptide chain, wherein the first and second polypeptide chains are covalently bonded to one another, the second and third polypeptide chains are covalently bonded to one another, and the third and fourth polypeptide chain, and wherein: (a) the first polypeptide chain comprises in the N-terminal to C-terminal direction: (i) a light chain variable domain of a first immunoglobulin (VL-1) that is capable of specifically binding to a first epitope; (ii) a light chain constant domain of the first immunoglobulin (CL-1); (iii) a flexible peptide linker comprising the amino acid sequence (GGGGS)₃ (SEQ ID NO: 2506); and (iv) a light chain variable domain of a second immunoglobulin (VL-2) that is linked to a complementary heavy chain variable domain of the second immunoglobulin (VH-2), or a heavy chain variable domain of a second immunoglobulin (VH-2) that is linked to a complementary light chain variable domain of the second immunoglobulin (VL-2), wherein VL-2 and VH-2 are capable of specifically binding to a second epitope, and are linked together via a flexible peptide linker comprising the amino acid sequence (GGGGS)₆ (SEQ ID NO: 2507) to form a single-chain variable fragment; (b) the second polypeptide comprises in the N-terminal to C-terminal direction: (i) a heavy chain variable domain of the first immunoglobulin (VH-1) that is capable of specifically binding to the first epitope; (ii) a first CH1 domain of the first immunoglobulin (CH1-1); and (iii) a first heterodimerization domain of the first immunoglobulin, wherein the first heterodimerization domain is incapable of forming a stable homodimer with another first heterodimerization domain; (c) the third polypeptide comprises in the N-terminal to C-terminal direction: (i) a heavy chain variable domain of a third immunoglobulin (VH-3) that is capable of specifically binding to a third epitope; (ii) a second CH1 domain of the third immunoglobulin (CH1-3); and (iii) a second heterodimerization domain of the third immunoglobulin, wherein the second heterodimerization domain comprises an amino acid sequence or a nucleic acid sequence that is distinct from the first heterodimerization domain of the first immunoglobulin, wherein the second heterodimerization domain is incapable of forming a stable homodimer with another second heterodimerization domain, and wherein the second heterodimerization domain of the third immunoglobulin is configured to form a heterodimer with the first heterodimerization domain of the first immunoglobulin; (d) the fourth polypeptide comprises in the N-terminal to C-terminal direction: (i) a light chain variable domain of the third immunoglobulin (VL-3) that is capable of specifically binding to the third epitope; (ii) a light chain constant domain of the third immunoglobulin (CL-3); (iii) a flexible peptide linker comprising the amino acid sequence (GGGGS)₃ (SEQ ID NO: 2506); and (iv) a light chain variable domain of a fourth immunoglobulin (VL-4) that is linked to a complementary heavy chain variable domain of the fourth immunoglobulin (VH-4), or a heavy chain variable domain of a fourth immunoglobulin (VH-4) that is linked to a complementary light chain variable domain of the fourth immunoglobulin (VL-4), wherein VL-4 and VH-4 are capable of specifically binding to the second epitope, and are linked together via a flexible peptide linker comprising the amino acid sequence (GGGGS)₆ (SEQ ID NO: 2507) to form a single-chain variable fragment, and wherein each of VL-1 and VL-3 independently comprises the CDR1 sequence, the CDR2 sequence and the CDR3 sequence of a V_{L} amino acid sequence selected from any one of SEQ ID NOs: 1, 9, 17, 25, 33, 41, 49, 57, 65, 73, 81, 89, 97, 105, 113, 121, 129, 145, 153, 161, 169, 177, 193, 201, 233, 241, 257, 273, 281, 289, 297, 305, 313, 321, 329, 337, 345, 353, 361, 369, 377, 385, 393, 401, 409, 417, 425, 433, 441, 449, 457, 465, 481, 489, 497, 521, 529, 537, 545, 553, 561, 609, 617, 681, 689, 697, 705, 713, 721, 729, 737, 745, 753, 761, 769, 777, 785, 793, 801, 809, 817, 825, 833, 841, 849, 857, 865, 873, 881, 889, 945, 953, 961, 977, 985, 993, 1001, 1009, 1017, 1025, 1033, 1041, 1049, 1065, 1073, 1081, 1089, 1097, 1105, 1113, 1121, 1129, 1137, 1145, 1153, 1161, 1169, 1177, 1185, 1193, 1201, 1209, 1217, 1225, 1233, 1241, 1249, 1257, 1265, 1273, 1281, 1289, 1297, 1305, 1313, 1321, 1329, 1337, 1345, 1353, 1361, 1369, 1377, 1385, 1393, 1401, 1409, 1417, 1425, 1433, 1441, 1449, 1457, 1465, 1473, 1481, 1489, 1497, 1505, 1513, 1521, 1529, 1545, 1553, 1561, 1569, 1577, 1585, 1593, 1601, 1609, 1617, 1625, 1633, 1649, 1657, 1673, 1681, 1689, 1697, 1705, 1713, 1721, 1729, 1737, 1745, 1753, 1761, 1769, 1777, 1785, 1793, 1801, 1809, 1817, 1833, 1841, 1849, 1857, 1865, 1873, 1881, 1889, 1913, 1937, 1945, 1953, 1961, 1969, 1977, 1985, 1993, 2001, 2009, 2017, 2025, 2033, 2041, 2049, 2057, 2065, 2073, 2081, 2089, 2097, 2105, 2113, 2121, 2129, 2137, 2145, 2153, 2161, 2169, 2177, 2185, 2193, 2201, 2209, 2217, 2225, 2233, 2241, 2249, 2257, 2265, 2273, 2281, 2297, 2305, 2313, 2321, 2329, 2337 and 2345; and/or wherein each of VH-1 and VH-3 independently comprises the CDR1 sequence, the CDR2 sequence and the CDR3 sequence of a V_{H} amino acid sequence selected from any one of SEQ ID NOs: 5, 13, 21, 29, 37, 45, 53, 61, 69, 77, 85, 93, 101, 109, 117, 125, 133, 149, 157, 165, 173, 181, 197, 205, 237, 245, 261, 277, 285, 293, 301, 309, 317, 325, 333, 341, 349, 357, 365, 373, 381, 389, 397, 405, 413, 421, 429, 437, 445, 453, 461, 469, 485, 493, 501, 525, 533, 541, 549, 557, 565, 613, 621, 685, 693, 701, 709, 717, 725, 733, 741, 749, 757, 765, 773, 781, 789, 797, 805, 813, 821, 829, 837, 845, 853, 861, 869, 877, 885, 893, 949, 957, 965, 981, 989, 997, 1005, 1013, 1021, 1029, 1037, 1045, 1053, 1069, 1077, 1085, 1093, 1101, 1109, 1117, 1125, 1133, 1141, 1149, 1157, 1165, 1173, 1181, 1189, 1197, 1205, 1213, 1221, 1229, 1237, 1245, 1253, 1261, 1269, 1277, 1285, 1293, 1301, 1309, 1317, 1325, 1333, 1341, 1349, 1357, 1365, 1373, 1381, 1389, 1397, 1405, 1413, 1421, 1429, 1437, 1445, 1453, 1461, 1469, 1477, 1485, 1493, 1501, 1509, 1517, 1525, 1533, 1549, 1557, 1565, 1573, 1581, 1589, 1597, 1605, 1613, 1621, 1629, 1637, 1653, 1661, 1677, 1685, 1693, 1701, 1709, 1717, 1725, 1733, 1741, 1749, 1757, 1765, 1773, 1781, 1789, 1797, 1805, 1813, 1821, 1837, 1845, 1853, 1861, 1869, 1877, 1885, 1893, 1917, 1941, 1949, 1957, 1965, 1973, 1981, 1989, 1997, 2005, 2013, 2021, 2029, 2037, 2045, 2053, 2061, 2069, 2077, 2085, 2093, 2101, 2109, 2117, 2125, 2133, 2141, 2149, 2157, 2165, 2173, 2181, 2189, 2197, 2205, 2213, 2221, 2229, 2237, 2245, 2253, 2261, 2269, 2277, 2285, 2301, 2309, 2317, 2325, 2333, 2341, and 2349.

[0128] In one aspect, the present disclosure provides a heterodimeric multispecific antibody comprising a first polypeptide chain, a second polypeptide chain, a third polypeptide chain and a fourth polypeptide chain, wherein the first and second polypeptide chains are covalently bonded to one another, the second and third polypeptide chains are covalently bonded to one another, and the third and fourth polypeptide chain, and wherein: (a) the first polypeptide chain comprises in the N-terminal to C-terminal direction: (i) a light chain variable domain of a first immunoglobulin (VL-1) that is capable of specifically binding to a first epitope; (ii) a light chain constant domain of the first immunoglobulin (CL-1); (iii) a flexible peptide linker comprising the amino acid sequence (GGGGS)₃ (SEQ ID NO: 2506); and (iv) a light chain variable domain of a second immunoglobulin (VL-2) that is linked to a complementary heavy chain variable domain of the second immunoglobulin (VH-2), or a heavy chain variable domain of a second immunoglobulin (VH-2) that is linked to a complementary light chain variable domain of the second immunoglobulin (VL-2), wherein the VL-2 and VH-2 are capable of specifically binding to a second epitope, and are linked together via a flexible peptide linker comprising the amino acid sequence (GGGGS)₆ (SEQ ID NO: 2507) to form a single-chain variable fragment; (b) the second polypeptide comprises in the N-terminal to C-terminal direction: (i) a heavy chain variable domain of the first immunoglobulin (VH-1) that is capable of specifically binding to the first epitope; (ii) a first CH1 domain of the first immunoglobulin (CH1-1); and (iii) a first heterodimerization domain of the first immunoglobulin, wherein the first heterodimerization domain is incapable of forming a stable homodimer with another first heterodimerization domain; (c) the third polypeptide comprises in the N-terminal to C-terminal direction: (i) a heavy chain variable domain of a third immunoglobulin (VH-3) that is capable of specifically binding to the first epitope; (ii) a second CH1 domain of the third immunoglobulin (CH1-3); and (iii) a second heterodimerization domain of the third immunoglobulin, wherein the second heterodimerization domain comprises an amino acid sequence or a nucleic acid sequence that is distinct from the first heterodimerization domain of the first immunoglobulin, wherein the second heterodimerization domain is incapable of forming a stable homodimer with another second heterodimerization domain, and wherein the second heterodimerization domain of the third immunoglobulin is configured to form a heterodimer with the first heterodimerization domain of the first immunoglobulin; (d) the fourth polypeptide comprises in the N-terminal to C-terminal direction: (i) a light chain variable domain of the third immunoglobulin (VL-3) that is capable of specifically binding to the first epitope; (ii) a light chain constant domain of the third immunoglobulin (CL-3); (iii) a flexible peptide linker comprising the amino acid sequence (GGGGS)₃ (SEQ ID NO: 2506); and (iv) a light chain variable domain of a fourth immunoglobulin (VL-4) that is linked to a complementary heavy chain variable domain of the fourth immunoglobulin (VH-4), or a heavy chain variable domain of a fourth immunoglobulin (VH-4) that is linked to a complementary light chain variable domain of the fourth immunoglobulin (VL-4), wherein the VL-4 and VH-4 are capable of specifically binding to a third epitope, and are linked together via a flexible peptide linker comprising the amino acid sequence (GGGGS)₆ (SEQ ID NO: 2507) to form a single-chain variable fragment, and wherein each of VL-2 and VL-4 independently comprises the CDR1 sequence, the CDR2 sequence and the CDR3 sequence of a V_{L} amino acid sequence selected from any one of SEQ ID NOs: 17, 25, 33, 41, 121, 137, 169, 177, 185, 193, 201, 209, 217, 225, 233, 241, 249, 257, 265, 321, 329, 337, 393, 401, 409, 473, 481, 489, 497, 505, 513, 545, 553, 561, 569, 577, 585, 593, 601, 625, 633, 641, 649, 657, 665, 673, 681, 689, 697, 705, 713, 721, 729, 737, 745, 753, 761, 769, 785, 793, 801, 809, 817, 849, 857, 865, 873, 881, 889, 897, 905, 913, 921, 929, 937, 945, 969, 977, 1009, 1057, 1537, 1569, 1601, 1641, 1665, 1825, 1865, 1897, 1905, 1913, 1921, 1929, 2265, 2281 2289, 2329, and 2345; and/or wherein each of VH-2 and VH-4 independently comprises the CDR1 sequence, the CDR2 sequence and the CDR3 sequence of a V_{H} amino acid sequence selected from any one of SEQ ID NOs: 21, 29, 37, 45, 125, 141, 173, 181, 189, 197, 205, 213, 221, 229, 237, 245, 253, 261, 269, 325, 333, 341, 397, 405, 413, 477, 485, 493, 501, 509, 517, 549, 557, 565, 573, 581, 589, 597, 605, 629, 637, 645, 653, 661, 669, 677, 685, 693, 701, 709, 717, 725, 733, 741, 749, 757, 765, 773, 789, 797, 805, 813, 821, 853, 861, 869, 877, 885, 893, 901, 909, 917, 925, 933, 941, 949, 973, 981, 1013, 1061, 1541, 1573, 1605, 1645, 1669, 1829, 1869, 1901, 1909, 1917, 1925, 1933, 2269, 2285, 2293, 2333, and 2349.

[0129] In another aspect, the present disclosure provides a heterodimeric multispecific antibody comprising a first polypeptide chain, a second polypeptide chain, a third polypeptide chain and a fourth polypeptide chain, wherein the first and second polypeptide chains are covalently bonded to one another, the second and third polypeptide chains are covalently bonded to one another, and the third and fourth polypeptide chain, and wherein: (a) the first polypeptide chain comprises in the N-terminal to C-terminal direction: (i) a light chain variable domain of a first immunoglobulin (VL-1) that is capable of specifically binding to a first epitope; (ii) a light chain constant domain of the first immunoglobulin (CL-1); (iii) a flexible peptide linker comprising the amino acid sequence (GGGGS)₃ (SEQ ID NO: 2506); and (iv) a light chain variable domain of a second immunoglobulin (VL-2) that is linked to a complementary heavy chain variable domain of the second immunoglobulin (VH-2), or a heavy chain variable domain of a second immunoglobulin (VH-2) that is linked to a complementary light chain variable domain of the second immunoglobulin (VL-2), wherein VL-2 and VH-2 are capable of specifically binding to a second epitope, and are linked together via a flexible peptide linker comprising the amino acid sequence (GGGGS)₆ (SEQ ID NO: 2507) to form a single-chain variable fragment; (b) the second polypeptide comprises in the N-terminal to C-terminal direction: (i) a heavy chain variable domain of the first immunoglobulin (VH-1) that is capable of specifically binding to the first epitope; (ii) a first CH1 domain of the first immunoglobulin (CH1-1); and (iii) a first heterodimerization domain of the first immunoglobulin, wherein the first heterodimerization domain is incapable of forming a stable homodimer with another first heterodimerization domain; (c) the third polypeptide comprises in the N-terminal to C-terminal direction: (i) a heavy chain variable domain of a third immunoglobulin (VH-3) that is capable of specifically binding to a third epitope; (ii) a second CH1 domain of the third immunoglobulin (CH1-3); and (iii) a second heterodimerization domain of the third immunoglobulin, wherein the second heterodimerization domain comprises an amino acid sequence or a nucleic acid sequence that is distinct from the first heterodimerization domain of the first immunoglobulin, wherein the second heterodimerization domain is incapable of forming a stable homodimer with another second heterodimerization domain, and wherein the second heterodimerization domain of the third immunoglobulin is configured to form a heterodimer with the first heterodimerization domain of the first immunoglobulin; (d) the fourth polypeptide comprises in the N-terminal to C-terminal direction: (i) a light chain variable domain of the third immunoglobulin (VL-3) that is capable of specifically binding to the third epitope; (ii) a light chain constant domain of the third immunoglobulin (CL-3); (iii) a flexible peptide linker comprising the amino acid sequence (GGGGS)₃ (SEQ ID NO: 2506); and (iv) a light chain variable domain of a fourth immunoglobulin (VL-4) that is linked to a complementary heavy chain variable domain of the fourth immunoglobulin (VH-4), or a heavy chain variable domain of a fourth immunoglobulin (VH-4) that is linked to a complementary light chain variable domain of the fourth immunoglobulin (VL-4), wherein VL-4 and VH-4 are capable of specifically binding to the fourth epitope, and are linked together via a flexible peptide linker comprising the amino acid sequence (GGGGS)₆ (SEQ ID NO: 2507) to form a single-chain variable fragment; and wherein each of VL-1 and VL-3 independently comprises the CDR1 sequence, the CDR2 sequence and the CDR3 sequence of a V_{L} amino acid sequence selected from any one of SEQ ID NOs: 1, 9, 17, 25, 33, 41, 49, 57, 65, 73, 81, 89, 97, 105, 113, 121, 129, 145, 153, 161, 169, 177, 193, 201, 233, 241, 257, 273, 281, 289, 297, 305, 313, 321, 329, 337, 345, 353, 361, 369, 377, 385, 393, 401, 409, 417, 425, 433, 441, 449, 457, 465, 481, 489, 497, 521, 529, 537, 545, 553, 561, 609, 617, 681, 689, 697, 705, 713, 721, 729, 737, 745, 753, 761, 769, 777, 785, 793, 801, 809, 817, 825, 833, 841, 849, 857, 865, 873, 881, 889, 945, 953, 961, 977, 985, 993, 1001, 1009, 1017, 1025, 1033, 1041, 1049, 1065, 1073, 1081, 1089, 1097, 1105, 1113, 1121, 1129, 1137, 1145, 1153, 1161, 1169, 1177, 1185, 1193, 1201, 1209, 1217, 1225, 1233, 1241, 1249, 1257, 1265, 1273, 1281, 1289, 1297, 1305, 1313, 1321, 1329, 1337, 1345, 1353, 1361, 1369, 1377, 1385, 1393, 1401, 1409, 1417, 1425, 1433, 1441, 1449, 1457, 1465, 1473, 1481, 1489, 1497, 1505, 1513, 1521, 1529, 1545, 1553, 1561, 1569, 1577, 1585, 1593, 1601, 1609, 1617, 1625, 1633, 1649, 1657, 1673, 1681, 1689, 1697, 1705, 1713, 1721, 1729, 1737, 1745, 1753, 1761, 1769, 1777, 1785, 1793, 1801, 1809, 1817, 1833, 1841, 1849, 1857, 1865, 1873, 1881, 1889, 1913, 1937, 1945, 1953, 1961, 1969, 1977, 1985, 1993, 2001, 2009, 2017, 2025, 2033, 2041, 2049, 2057, 2065, 2073, 2081, 2089, 2097, 2105, 2113, 2121, 2129, 2137, 2145, 2153, 2161, 2169, 2177, 2185, 2193, 2201, 2209, 2217, 2225, 2233, 2241, 2249, 2257, 2265, 2273, 2281, 2297, 2305, 2313, 2321, 2329, 2337 and 2345; and/or wherein each of VH-1 and VH-3 independently comprises the CDR1 sequence, the CDR2 sequence and the CDR3 sequence of a V_{H} amino acid sequence selected from any one of SEQ ID NOs: 5, 13, 21, 29, 37, 45, 53, 61, 69, 77, 85, 93, 101, 109, 117, 125, 133, 149, 157, 165, 173, 181, 197, 205, 237, 245, 261, 277, 285, 293, 301, 309, 317, 325, 333, 341, 349, 357, 365, 373, 381, 389, 397, 405, 413, 421, 429, 437, 445, 453, 461, 469, 485, 493, 501, 525, 533, 541, 549, 557, 565, 613, 621, 685, 693, 701, 709, 717, 725, 733, 741, 749, 757, 765, 773, 781, 789, 797, 805, 813, 821, 829, 837, 845, 853, 861, 869, 877, 885, 893, 949, 957, 965, 981, 989, 997, 1005, 1013, 1021, 1029, 1037, 1045, 1053, 1069, 1077, 1085, 1093, 1101, 1109, 1117, 1125, 1133, 1141, 1149, 1157, 1165, 1173, 1181, 1189, 1197, 1205, 1213, 1221, 1229, 1237, 1245, 1253, 1261, 1269, 1277, 1285, 1293, 1301, 1309, 1317, 1325, 1333, 1341, 1349, 1357, 1365, 1373, 1381, 1389, 1397, 1405, 1413, 1421, 1429, 1437, 1445, 1453, 1461, 1469, 1477, 1485, 1493, 1501, 1509, 1517, 1525, 1533, 1549, 1557, 1565, 1573, 1581, 1589, 1597, 1605, 1613, 1621, 1629, 1637, 1653, 1661, 1677, 1685, 1693, 1701, 1709, 1717, 1725, 1733, 1741, 1749, 1757, 1765, 1773, 1781, 1789, 1797, 1805, 1813, 1821, 1837, 1845, 1853, 1861, 1869, 1877, 1885, 1893, 1917, 1941, 1949, 1957, 1965, 1973, 1981, 1989, 1997, 2005, 2013, 2021, 2029, 2037, 2045, 2053, 2061, 2069, 2077, 2085, 2093, 2101, 2109, 2117, 2125, 2133, 2141, 2149, 2157, 2165, 2173, 2181, 2189, 2197, 2205, 2213, 2221, 2229, 2237, 2245, 2253, 2261, 2269, 2277, 2285, 2301, 2309, 2317, 2325, 2333, 2341, and 2349; and/or wherein each of VL-2 and VL-4 independently comprises the CDR1 sequence, the CDR2 sequence and the CDR3 sequence of a V_{L} amino acid sequence selected from any one of SEQ ID NOs: 17, 25, 33, 41, 121, 137, 169, 177, 185, 193, 201, 209, 217, 225, 233, 241, 249, 257, 265, 321, 329, 337, 393, 401, 409, 473, 481, 489, 497, 505, 513, 545, 553, 561, 569, 577, 585, 593, 601, 625, 633, 641, 649, 657, 665, 673, 681, 689, 697, 705, 713, 721, 729, 737, 745, 753, 761, 769, 785, 793, 801, 809, 817, 849, 857, 865, 873, 881, 889, 897, 905, 913, 921, 929, 937, 945, 969, 977, 1009, 1057, 1537, 1569, 1601, 1641, 1665, 1825, 1865, 1897, 1905, 1913, 1921, 1929, 2265, 2281 2289, 2329, and 2345; and/or wherein each of VH-2 and VH-4 independently comprises the CDR1 sequence, the CDR2 sequence and the CDR3 sequence of a V_{H} amino acid sequence selected from any one of SEQ ID NOs: 21, 29, 37, 45, 125, 141, 173, 181, 189, 197, 205, 213, 221, 229, 237, 245, 253, 261, 269, 325, 333, 341, 397, 405, 413, 477, 485, 493, 501, 509, 517, 549, 557, 565, 573, 581, 589, 597, 605, 629, 637, 645, 653, 661, 669, 677, 685, 693, 701, 709, 717, 725, 733, 741, 749, 757, 765, 773, 789, 797, 805, 813, 821, 853, 861, 869, 877, 885, 893, 901, 909, 917, 925, 933, 941, 949, 973, 981, 1013, 1061, 1541, 1573, 1605, 1645, 1669, 1829, 1869, 1901, 1909, 1917, 1925, 1933, 2269, 2285, 2293, 2333, and 2349.

[0130] In another aspect, the present disclosure provides a heterodimeric multispecific antibody comprising a first polypeptide chain, a second polypeptide chain, a third polypeptide chain and a fourth polypeptide chain, wherein the first and second polypeptide chains are covalently bonded to one another, the second and third polypeptide chains are covalently bonded to one another, and the third and fourth polypeptide chain, and wherein: (a) the first polypeptide chain comprises in the N-terminal to C-terminal direction: (i) a light chain variable domain of a first immunoglobulin (VL-1) that is capable of specifically binding to a first epitope; (ii) a light chain constant domain of the first immunoglobulin (CL-1); (iii) a flexible peptide linker comprising the amino acid sequence (GGGGS)₃ (SEQ ID NO: 2506); and (iv) a light chain variable domain of a second immunoglobulin (VL-2) that is linked to a complementary heavy chain variable domain of the second immunoglobulin (VH-2), or a heavy chain variable domain of a second immunoglobulin (VH-2) that is linked to a complementary light chain variable domain of the second immunoglobulin (VL-2), wherein VL-2 and VH-2 are capable of specifically binding to a second epitope, and are linked together via a flexible peptide linker comprising the amino acid sequence (GGGGS)₆ (SEQ ID NO: 2507) to form a single-chain variable fragment; (b) the second polypeptide comprises in the N-terminal to C-terminal direction: (i) a heavy chain variable domain of the first immunoglobulin (VH-1) that is capable of specifically binding to the first epitope; (ii) a first CH1 domain of the first immunoglobulin (CH1-1); and (iii) a first heterodimerization domain of the first immunoglobulin, wherein the first heterodimerization domain is incapable of forming a stable homodimer with another first heterodimerization domain; (c) the third polypeptide comprises in the N-terminal to C-terminal direction: (i) a heavy chain variable domain of a third immunoglobulin (VH-3) that is capable of specifically binding to the first epitope; (ii) a second CH1 domain of the third immunoglobulin (CH1-3); and (iii) a second heterodimerization domain of the third immunoglobulin, wherein the second heterodimerization domain comprises an amino acid sequence or a nucleic acid sequence that is distinct from the first heterodimerization domain of the first immunoglobulin, wherein the second heterodimerization domain is incapable of forming a stable homodimer with another second heterodimerization domain, and wherein the second heterodimerization domain of the third immunoglobulin is configured to form a heterodimer with the first heterodimerization domain of the first immunoglobulin; (d) the fourth polypeptide comprises in the N-terminal to C-terminal direction: (i) a light chain variable domain of the third immunoglobulin (VL-3) that is capable of specifically binding to the first epitope; and (ii) a light chain constant domain of the third immunoglobulin (CL-3); and wherein VL-2 comprises the CDR1 sequence, the CDR2 sequence and the CDR3 sequence of a V_{L} amino acid sequence selected from any one of SEQ ID NOs: 17, 25, 33, 41, 121, 137, 169, 177, 185, 193, 201, 209, 217, 225, 233, 241, 249, 257, 265, 321, 329, 337, 393, 401, 409, 473, 481, 489, 497, 505, 513, 545, 553, 561, 569, 577, 585, 593, 601, 625, 633, 641, 649, 657, 665, 673, 681, 689, 697, 705, 713, 721, 729, 737, 745, 753, 761, 769, 785, 793, 801, 809, 817, 849, 857, 865, 873, 881, 889, 897, 905, 913, 921, 929, 937, 945, 969, 977, 1009, 1057, 1537, 1569, 1601, 1641, 1665, 1825, 1865, 1897, 1905, 1913, 1921, 1929, 2265, 2281 2289, 2329, and 2345; and/or wherein VH-2 comprises the CDR1 sequence, the CDR2 sequence and the CDR3 sequence of a V_{H} amino acid sequence selected from any one of SEQ ID NOs: 21, 29, 37, 45, 125, 141, 173, 181, 189, 197, 205, 213, 221, 229, 237, 245, 253, 261, 269, 325, 333, 341, 397, 405, 413, 477, 485, 493, 501, 509, 517, 549, 557, 565, 573, 581, 589, 597, 605, 629, 637, 645, 653, 661, 669, 677, 685, 693, 701, 709, 717, 725, 733, 741, 749, 757, 765, 773, 789, 797, 805, 813, 821, 853, 861, 869, 877, 885, 893, 901, 909, 917, 925, 933, 941, 949, 973, 981, 1013, 1061, 1541, 1573, 1605, 1645, 1669, 1829, 1869, 1901, 1909, 1917, 1925, 1933, 2269, 2285, 2293, 2333, and 2349. In some embodiments, both VH-1 and VH-3 comprise the CDR1 sequence, the CDR2 sequence and the CDR3 sequence of a V_{H} amino acid sequence selected from any one of SEQ ID NOs: 5, 13, 21, 29, 37, 45, 53, 61, 69, 77, 85, 93, 101, 109, 117, 125, 133, 149, 157, 165, 173, 181, 197, 205, 237, 245, 261, 277, 285, 293, 301, 309, 317, 325, 333, 341, 349, 357, 365, 373, 381, 389, 397, 405, 413, 421, 429, 437, 445, 453, 461, 469, 485, 493, 501, 525, 533, 541, 549, 557, 565, 613, 621, 685, 693, 701, 709, 717, 725, 733, 741, 749, 757, 765, 773, 781, 789, 797, 805, 813, 821, 829, 837, 845, 853, 861, 869, 877, 885, 893, 949, 957, 965, 981, 989, 997, 1005, 1013, 1021, 1029, 1037, 1045, 1053, 1069, 1077, 1085, 1093, 1101, 1109, 1117, 1125, 1133, 1141, 1149, 1157, 1165, 1173, 1181, 1189, 1197, 1205, 1213, 1221, 1229, 1237, 1245, 1253, 1261, 1269, 1277, 1285, 1293, 1301, 1309, 1317, 1325, 1333, 1341, 1349, 1357, 1365, 1373, 1381, 1389, 1397, 1405, 1413, 1421, 1429, 1437, 1445, 1453, 1461, 1469, 1477, 1485, 1493, 1501, 1509, 1517, 1525, 1533, 1549, 1557, 1565, 1573, 1581, 1589, 1597, 1605, 1613, 1621, 1629, 1637, 1653, 1661, 1677, 1685, 1693, 1701, 1709, 1717, 1725, 1733, 1741, 1749, 1757, 1765, 1773, 1781, 1789, 1797, 1805, 1813, 1821, 1837, 1845, 1853, 1861, 1869, 1877, 1885, 1893, 1917, 1941, 1949, 1957, 1965, 1973, 1981, 1989, 1997, 2005, 2013, 2021, 2029, 2037, 2045, 2053, 2061, 2069, 2077, 2085, 2093, 2101, 2109, 2117, 2125, 2133, 2141, 2149, 2157, 2165, 2173, 2181, 2189, 2197, 2205, 2213, 2221, 2229, 2237, 2245, 2253, 2261, 2269, 2277, 2285, 2301, 2309, 2317, 2325, 2333, 2341, and 2349; and/or both VL-1 and VL-3 comprise the CDR1 sequence, the CDR2 sequence and the CDR3 sequence of a V_{L} amino acid sequence selected from any one of SEQ ID NOs: 1, 9, 17, 25, 33, 41, 49, 57, 65, 73, 81, 89, 97, 105, 113, 121, 129, 145, 153, 161, 169, 177, 193, 201, 233, 241, 257, 273, 281, 289, 297, 305, 313, 321, 329, 337, 345, 353, 361, 369, 377, 385, 393, 401, 409, 417, 425, 433, 441, 449, 457, 465, 481, 489, 497, 521, 529, 537, 545, 553, 561, 609, 617, 681, 689, 697, 705, 713, 721, 729, 737, 745, 753, 761, 769, 777, 785, 793, 801, 809, 817, 825, 833, 841, 849, 857, 865, 873, 881, 889, 945, 953, 961, 977, 985, 993, 1001, 1009, 1017, 1025, 1033, 1041, 1049, 1065, 1073, 1081, 1089, 1097, 1105, 1113, 1121, 1129, 1137, 1145, 1153, 1161, 1169, 1177, 1185, 1193, 1201, 1209, 1217, 1225, 1233, 1241, 1249, 1257, 1265, 1273, 1281, 1289, 1297, 1305, 1313, 1321, 1329, 1337, 1345, 1353, 1361, 1369, 1377, 1385, 1393, 1401, 1409, 1417, 1425, 1433, 1441, 1449, 1457, 1465, 1473, 1481, 1489, 1497, 1505, 1513, 1521, 1529, 1545, 1553, 1561, 1569, 1577, 1585, 1593, 1601, 1609, 1617, 1625, 1633, 1649, 1657, 1673, 1681, 1689, 1697, 1705, 1713, 1721, 1729, 1737, 1745, 1753, 1761, 1769, 1777, 1785, 1793, 1801, 1809, 1817, 1833, 1841, 1849, 1857, 1865, 1873, 1881, 1889, 1913, 1937, 1945, 1953, 1961, 1969, 1977, 1985, 1993, 2001, 2009, 2017, 2025, 2033, 2041, 2049, 2057, 2065, 2073, 2081, 2089, 2097, 2105, 2113, 2121, 2129, 2137, 2145, 2153, 2161, 2169, 2177, 2185, 2193, 2201, 2209, 2217, 2225, 2233, 2241, 2249, 2257, 2265, 2273, 2281, 2297, 2305, 2313, 2321, 2329, 2337 and 2345.

[0131] In yet another aspect, the present disclosure provides a heterodimeric multispecific antibody comprising a first polypeptide chain, a second polypeptide chain, a third polypeptide chain and a fourth polypeptide chain, wherein the first and second polypeptide chains are covalently bonded to one another, the second and third polypeptide chains are covalently bonded to one another, and the third and fourth polypeptide chain, and wherein: (a) the first polypeptide chain comprises in the N-terminal to C-terminal direction: (i) a light chain variable domain of a first immunoglobulin (VL-1) that is capable of specifically binding to a first epitope; (ii) a light chain constant domain of the first immunoglobulin (CL-1); (iii) a flexible peptide linker comprising the amino acid sequence (GGGGS)₃ (SEQ ID NO: 2506); and (iv) a light chain variable domain of a second immunoglobulin (VL-2) that is linked to a complementary heavy chain variable domain of the second immunoglobulin (VH-2), or a heavy chain variable domain of a second immunoglobulin (VH-2) that is linked to a complementary light chain variable domain of the second immunoglobulin (VL-2), wherein VL-2 and VH-2 are capable of specifically binding to a second epitope, and are linked together via a flexible peptide linker comprising the amino acid sequence (GGGGS)₆ (SEQ ID NO: 2507) to form a single-chain variable fragment; (b) the second polypeptide comprises in the N-terminal to C-terminal direction: (i) a heavy chain variable domain of the first immunoglobulin (VH-1) that is capable of specifically binding to the first epitope; (ii) a first CH1 domain of the first immunoglobulin (CH1-1); and (iii) a first heterodimerization domain of the first immunoglobulin, wherein the first heterodimerization domain is incapable of forming a stable homodimer with another first heterodimerization domain; (c) the third polypeptide comprises in the N-terminal to C-terminal direction: (i) a heavy chain variable domain of a third immunoglobulin (VH-3) that is capable of specifically binding to a third epitope; (ii) a second CH1 domain of the third immunoglobulin (CH1-3); and (iii) a second heterodimerization domain of the third immunoglobulin, wherein the second heterodimerization domain comprises an amino acid sequence or a nucleic acid sequence that is distinct from the first heterodimerization domain of the first immunoglobulin, wherein the second heterodimerization domain is incapable of forming a stable homodimer with another second heterodimerization domain, and wherein the second heterodimerization domain of the third immunoglobulin is configured to form a heterodimer with the first heterodimerization domain of the first immunoglobulin; (d) the fourth polypeptide comprises in the N-terminal to C-terminal direction: (i) a light chain variable domain of the third immunoglobulin (VL-3) that is capable of specifically binding to the third epitope; and (ii) a light chain constant domain of the third immunoglobulin (CL-3); and wherein each of VL-1 and VL-3 independently comprises the CDR1 sequence, the CDR2 sequence and the CDR3 sequence of a V_{L} amino acid sequence selected from any one of SEQ ID NOs: 1, 9, 17, 25, 33, 41, 49, 57, 65, 73, 81, 89, 97, 105, 113, 121, 129, 145, 153, 161, 169, 177, 193, 201, 233, 241, 257, 273, 281, 289, 297, 305, 313, 321, 329, 337, 345, 353, 361, 369, 377, 385, 393, 401, 409, 417, 425, 433, 441, 449, 457, 465, 481, 489, 497, 521, 529, 537, 545, 553, 561, 609, 617, 681, 689, 697, 705, 713, 721, 729, 737, 745, 753, 761, 769, 777, 785, 793, 801, 809, 817, 825, 833, 841, 849, 857, 865, 873, 881, 889, 945, 953, 961, 977, 985, 993, 1001, 1009, 1017, 1025, 1033, 1041, 1049, 1065, 1073, 1081, 1089, 1097, 1105, 1113, 1121, 1129, 1137, 1145, 1153, 1161, 1169, 1177, 1185, 1193, 1201, 1209, 1217, 1225, 1233, 1241, 1249, 1257, 1265, 1273, 1281, 1289, 1297, 1305, 1313, 1321, 1329, 1337, 1345, 1353, 1361, 1369, 1377, 1385, 1393, 1401, 1409, 1417, 1425, 1433, 1441, 1449, 1457, 1465, 1473, 1481, 1489, 1497, 1505, 1513, 1521, 1529, 1545, 1553, 1561, 1569, 1577, 1585, 1593, 1601, 1609, 1617, 1625, 1633, 1649, 1657, 1673, 1681, 1689, 1697, 1705, 1713, 1721, 1729, 1737, 1745, 1753, 1761, 1769, 1777, 1785, 1793, 1801, 1809, 1817, 1833, 1841, 1849, 1857, 1865, 1873, 1881, 1889, 1913, 1937, 1945, 1953, 1961, 1969, 1977, 1985, 1993, 2001, 2009, 2017, 2025, 2033, 2041, 2049, 2057, 2065, 2073, 2081, 2089, 2097, 2105, 2113, 2121, 2129, 2137, 2145, 2153, 2161, 2169, 2177, 2185, 2193, 2201, 2209, 2217, 2225, 2233, 2241, 2249, 2257, 2265, 2273, 2281, 2297, 2305, 2313, 2321, 2329, 2337 and 2345; and/or wherein each of VH-1 and VH-3 independently comprises the CDR1 sequence, the CDR2 sequence and the CDR3 sequence of a V_{H} amino acid sequence selected from any one of SEQ ID NOs: 5, 13, 21, 29, 37, 45, 53, 61, 69, 77, 85, 93, 101, 109, 117, 125, 133, 149, 157, 165, 173, 181, 197, 205, 237, 245, 261, 277, 285, 293, 301, 309, 317, 325, 333, 341, 349, 357, 365, 373, 381, 389, 397, 405, 413, 421, 429, 437, 445, 453, 461, 469, 485, 493, 501, 525, 533, 541, 549, 557, 565, 613, 621, 685, 693, 701, 709, 717, 725, 733, 741, 749, 757, 765, 773, 781, 789, 797, 805, 813, 821, 829, 837, 845, 853, 861, 869, 877, 885, 893, 949, 957, 965, 981, 989, 997, 1005, 1013, 1021, 1029, 1037, 1045, 1053, 1069, 1077, 1085, 1093, 1101, 1109, 1117, 1125, 1133, 1141, 1149, 1157, 1165, 1173, 1181, 1189, 1197, 1205, 1213, 1221, 1229, 1237, 1245, 1253, 1261, 1269, 1277, 1285, 1293, 1301, 1309, 1317, 1325, 1333, 1341, 1349, 1357, 1365, 1373, 1381, 1389, 1397, 1405, 1413, 1421, 1429, 1437, 1445, 1453, 1461, 1469, 1477, 1485, 1493, 1501, 1509, 1517, 1525, 1533, 1549, 1557, 1565, 1573, 1581, 1589, 1597, 1605, 1613, 1621, 1629, 1637, 1653, 1661, 1677, 1685, 1693, 1701, 1709, 1717, 1725, 1733, 1741, 1749, 1757, 1765, 1773, 1781, 1789, 1797, 1805, 1813, 1821, 1837, 1845, 1853, 1861, 1869, 1877, 1885, 1893, 1917, 1941, 1949, 1957, 1965, 1973, 1981, 1989, 1997, 2005, 2013, 2021, 2029, 2037, 2045, 2053, 2061, 2069, 2077, 2085, 2093, 2101, 2109, 2117, 2125, 2133, 2141, 2149, 2157, 2165, 2173, 2181, 2189, 2197, 2205, 2213, 2221, 2229, 2237, 2245, 2253, 2261, 2269, 2277, 2285, 2301, 2309, 2317, 2325, 2333, 2341, and 2349; and/or wherein VL-2 comprises the CDR1 sequence, the CDR2 sequence and the CDR3 sequence of a V_{L} amino acid sequence selected from any one of SEQ ID NOs: 17, 25, 33, 41, 121, 137, 169, 177, 185, 193, 201, 209, 217, 225, 233, 241, 249, 257, 265, 321, 329, 337, 393, 401, 409, 473, 481, 489, 497, 505, 513, 545, 553, 561, 569, 577, 585, 593, 601, 625, 633, 641, 649, 657, 665, 673, 681, 689, 697, 705, 713, 721, 729, 737, 745, 753, 761, 769, 785, 793, 801, 809, 817, 849, 857, 865, 873, 881, 889, 897, 905, 913, 921, 929, 937, 945, 969, 977, 1009, 1057, 1537, 1569, 1601, 1641, 1665, 1825, 1865, 1897, 1905, 1913, 1921, 1929, 2265, 2281 2289, 2329, and 2345; and/or wherein VH-2 comprises the CDR1 sequence, the CDR2 sequence and the CDR3 sequence of a V_{H} amino acid sequence selected from any one of SEQ ID NOs: 21, 29, 37, 45, 125, 141, 173, 181, 189, 197, 205, 213, 221, 229, 237, 245, 253, 261, 269, 325, 333, 341, 397, 405, 413, 477, 485, 493, 501, 509, 517, 549, 557, 565, 573, 581, 589, 597, 605, 629, 637, 645, 653, 661, 669, 677, 685, 693, 701, 709, 717, 725, 733, 741, 749, 757, 765, 773, 789, 797, 805, 813, 821, 853, 861, 869, 877, 885, 893, 901, 909, 917, 925, 933, 941, 949, 973, 981, 1013, 1061, 1541, 1573, 1605, 1645, 1669, 1829, 1869, 1901, 1909, 1917, 1925, 1933, 2269, 2285, 2293, 2333, and 2349.

[0132] Additionally or alternatively, in some embodiments of the heterodimeric multispecific antibodies disclosed herein, VH-1 or VH-3 comprises an amino acid sequence that is at least 80%, at least 85%, at least 90%, at least 95%, at least 99% or 100% identical to a V_{H} amino acid sequence selected from any one of SEQ ID NOs: 5, 13, 21, 29, 37, 45, 53, 61, 69, 77, 85, 93, 101, 109, 117, 125, 133, 149, 157, 165, 173, 181, 197, 205, 237, 245, 261, 277, 285, 293, 301, 309, 317, 325, 333, 341, 349, 357, 365, 373, 381, 389, 397, 405, 413, 421, 429, 437, 445, 453, 461, 469, 485, 493, 501, 525, 533, 541, 549, 557, 565, 613, 621, 685, 693, 701, 709, 717, 725, 733, 741, 749, 757, 765, 773, 781, 789, 797, 805, 813, 821, 829, 837, 845, 853, 861, 869, 877, 885, 893, 949, 957, 965, 981, 989, 997, 1005, 1013, 1021, 1029, 1037, 1045, 1053, 1069, 1077, 1085, 1093, 1101, 1109, 1117, 1125, 1133, 1141, 1149, 1157, 1165, 1173, 1181, 1189, 1197, 1205, 1213, 1221, 1229, 1237, 1245, 1253, 1261, 1269, 1277, 1285, 1293, 1301, 1309, 1317, 1325, 1333, 1341, 1349, 1357, 1365, 1373, 1381, 1389, 1397, 1405, 1413, 1421, 1429, 1437, 1445, 1453, 1461, 1469, 1477, 1485, 1493, 1501, 1509, 1517, 1525, 1533, 1549, 1557, 1565, 1573, 1581, 1589, 1597, 1605, 1613, 1621, 1629, 1637, 1653, 1661, 1677, 1685, 1693, 1701, 1709, 1717, 1725, 1733, 1741, 1749, 1757, 1765, 1773, 1781, 1789, 1797, 1805, 1813, 1821, 1837, 1845, 1853, 1861, 1869, 1877, 1885, 1893, 1917, 1941, 1949, 1957, 1965, 1973, 1981, 1989, 1997, 2005, 2013, 2021, 2029, 2037, 2045, 2053, 2061, 2069, 2077, 2085, 2093, 2101, 2109, 2117, 2125, 2133, 2141, 2149, 2157, 2165, 2173, 2181, 2189, 2197, 2205, 2213, 2221, 2229, 2237, 2245, 2253, 2261, 2269, 2277, 2285, 2301, 2309, 2317, 2325, 2333, 2341, and 2349; and/or the VL-1 or VL-3 comprises an amino acid sequence that is at least 80%, at least 85%, at least 90%, at least 95%, at least 99% or 100% identical to a V_{L} amino acid sequence selected from any one of SEQ ID NOs: 1, 9, 17, 25, 33, 41, 49, 57, 65, 73, 81, 89, 97, 105, 113, 121, 129, 145, 153, 161, 169, 177, 193, 201, 233, 241, 257, 273, 281, 289, 297, 305, 313, 321, 329, 337, 345, 353, 361, 369, 377, 385, 393, 401, 409, 417, 425, 433, 441, 449, 457, 465, 481, 489, 497, 521, 529, 537, 545, 553, 561, 609, 617, 681, 689, 697, 705, 713, 721, 729, 737, 745, 753, 761, 769, 777, 785, 793, 801, 809, 817, 825, 833, 841, 849, 857, 865, 873, 881, 889, 945, 953, 961, 977, 985, 993, 1001, 1009, 1017, 1025, 1033, 1041, 1049, 1065, 1073, 1081, 1089, 1097, 1105, 1113, 1121, 1129, 1137, 1145, 1153, 1161, 1169, 1177, 1185, 1193, 1201, 1209, 1217, 1225, 1233, 1241, 1249, 1257, 1265, 1273, 1281, 1289, 1297, 1305, 1313, 1321, 1329, 1337, 1345, 1353, 1361, 1369, 1377, 1385, 1393, 1401, 1409, 1417, 1425, 1433, 1441, 1449, 1457, 1465, 1473, 1481, 1489, 1497, 1505, 1513, 1521, 1529, 1545, 1553, 1561, 1569, 1577, 1585, 1593, 1601, 1609, 1617, 1625, 1633, 1649, 1657, 1673, 1681, 1689, 1697, 1705, 1713, 1721, 1729, 1737, 1745, 1753, 1761, 1769, 1777, 1785, 1793, 1801, 1809, 1817, 1833, 1841, 1849, 1857, 1865, 1873, 1881, 1889, 1913, 1937, 1945, 1953, 1961, 1969, 1977, 1985, 1993, 2001, 2009, 2017, 2025, 2033, 2041, 2049, 2057, 2065, 2073, 2081, 2089, 2097, 2105, 2113, 2121, 2129, 2137, 2145, 2153, 2161, 2169, 2177, 2185, 2193, 2201, 2209, 2217, 2225, 2233, 2241, 2249, 2257, 2265, 2273, 2281, 2297, 2305, 2313, 2321, 2329, 2337 and 2345.

[0133] Additionally or alternatively, in some embodiments of the heterodimeric multispecific antibodies disclosed herein, VH-2 or VH-4 comprises an amino acid sequence that is at least 80%, at least 85%, at least 90%, at least 95%, at least 99% or 100% identical to a V_{H} amino acid sequence selected from any one of SEQ ID NOs: 21, 29, 37, 45, 125, 141, 173, 181, 189, 197, 205, 213, 221, 229, 237, 245, 253, 261, 269, 325, 333, 341, 397, 405, 413, 477, 485, 493, 501, 509, 517, 549, 557, 565, 573, 581, 589, 597, 605, 629, 637, 645, 653, 661, 669, 677, 685, 693, 701, 709, 717, 725, 733, 741, 749, 757, 765, 773, 789, 797, 805, 813, 821, 853, 861, 869, 877, 885, 893, 901, 909, 917, 925, 933, 941, 949, 973, 981, 1013, 1061, 1541, 1573, 1605, 1645, 1669, 1829, 1869, 1901, 1909, 1917, 1925, 1933, 2269, 2285, 2293, 2333, and 2349; and/or VL-2 or VL-4 comprises an amino acid sequence that is at least 80%, at least 85%, at least 90%, at least 95%, at least 99%, or 100% identical to a V_{L} amino acid sequence selected from any one of SEQ ID NOs: 17, 25, 33, 41, 121, 137, 169, 177, 185, 193, 201, 209, 217, 225, 233, 241, 249, 257, 265, 321, 329, 337, 393, 401, 409, 473, 481, 489, 497, 505, 513, 545, 553, 561, 569, 577, 585, 593, 601, 625, 633, 641, 649, 657, 665, 673, 681, 689, 697, 705, 713, 721, 729, 737, 745, 753, 761, 769, 785, 793, 801, 809, 817, 849, 857, 865, 873, 881, 889, 897, 905, 913, 921, 929, 937, 945, 969, 977, 1009, 1057, 1537, 1569, 1601, 1641, 1665, 1825, 1865, 1897, 1905, 1913, 1921, 1929, 2265, 2281 2289, 2329, and 2345.

[0134] Additionally or alternatively, in some embodiments of the heterodimeric multispecific antibodies disclosed herein, each of VL-1 and VH-1 comprise a V_{L} amino acid sequence and a V_{H} amino acid sequence selected from the group consisting of SEQ ID NOs: 1 and 5 respectively; SEQ ID NOs: 9 and 13 respectively; SEQ ID NOs: 17 and 21 respectively; SEQ ID NOs: 25 and 29 respectively; SEQ ID NOs: 33 and 37 respectively; SEQ ID NOs: 41 and 45 respectively; SEQ ID NOs: 49 and 53 respectively; SEQ ID NOs: 57 and 61 respectively; SEQ ID NOs: 73 and 77 respectively; SEQ ID NOs: 89 and 93 respectively; SEQ ID NOs: 97 and 101 respectively; SEQ ID NOs: 105 and 109 respectively; SEQ ID NOs: 113 and 117 respectively; SEQ ID NOs: 121 and 125 respectively; SEQ ID NOs: 129 and 133 respectively; SEQ ID NOs: 145 and 149 respectively; SEQ ID NOs: 161 and 165 respectively; SEQ ID NOs: 169 and 173 respectively; SEQ ID NOs: 177 and 181 respectively; SEQ ID NOs: 193 and 197 respectively; SEQ ID NOs: 201 and 205 respectively; SEQ ID NOs: 233 and 237 respectively; SEQ ID NOs: 241 and 245 respectively; SEQ ID NOs: 257 and 261 respectively; SEQ ID NOs: 273 and 277 respectively; SEQ ID NOs: 281 and 285 respectively; SEQ ID NOs: 289 and 293 respectively; SEQ ID NOs: 297 and 301 respectively; SEQ ID NOs: 305 and 309 respectively; SEQ ID NOs: 313 and 317 respectively; SEQ ID NOs: 321 and 325 respectively; SEQ ID NOs: 329 and 333 respectively; SEQ ID NOs: 337 and 341 respectively; SEQ ID NOs: 345 and 349 respectively; SEQ ID NOs: 353 and 357 respectively; SEQ ID NOs: 361 and 365 respectively; SEQ ID NOs: 369 and 373 respectively; SEQ ID NOs: 377 and 381 respectively; SEQ ID NOs: 385 and 389 respectively; SEQ ID NOs: 393 and 397 respectively; SEQ ID NOs: 401 and 405 respectively; SEQ ID NOs: 409 and 413 respectively; SEQ ID NOs: 417 and 421 respectively; SEQ ID NOs: 425 and 429 respectively; SEQ ID NOs: 433 and 437 respectively; SEQ ID NOs: 441 and 445 respectively; SEQ ID NOs: 449 and 453 respectively; SEQ ID NOs: 457 and 461 respectively; SEQ ID NOs: 465 and 469 respectively; SEQ ID NOs: 481 and 485 respectively; SEQ ID NOs: 489 and 493 respectively; SEQ ID NOs: 497 and 501 respectively; SEQ ID NOs: 521 and 525 respectively; SEQ ID NOs: 529 and 533 respectively; SEQ ID NOs: 537 and 541 respectively; SEQ ID NOs: 545 and 549 respectively; SEQ ID NOs: 553 and 557 respectively; SEQ ID NOs: 561 and 565 respectively; SEQ ID NOs: 609 and 613 respectively; SEQ ID NOs: 617 and 621 respectively; SEQ ID NOs: 681 and 685 respectively; SEQ ID NOs: 689 and 693 respectively; SEQ ID NOs: 697 and 701 respectively; SEQ ID NOs: 705 and 709 respectively; SEQ ID NOs: 713 and 717 respectively; SEQ ID NOs: 721 and 725 respectively; SEQ ID NOs: 729 and 733 respectively; SEQ ID NOs: 737 and 741 respectively; SEQ ID NOs: 745 and 749 respectively; SEQ ID NOs: 753 and 757 respectively; SEQ ID NOs: 761 and 765 respectively; SEQ ID NOs: 769 and 773 respectively; SEQ ID NOs: 785 and 789 respectively; SEQ ID NOs: 793 and 797 respectively; SEQ ID NOs: 801 and 805 respectively; SEQ ID NOs: 809 and 813 respectively; SEQ ID NOs: 817 and 821 respectively; SEQ ID NOs: 825 and 829 respectively; SEQ ID NOs: 833 and 837 respectively; SEQ ID NOs: 841 and 845 respectively; SEQ ID NOs: 849 and 853 respectively; SEQ ID NOs: 857 and 861 respectively; SEQ ID NOs: 865 and 869 respectively; SEQ ID NOs: 873 and 877 respectively; SEQ ID NOs: 881 and 885 respectively; SEQ ID NOs: 889 and 893 respectively; SEQ ID NOs: 945 and 949 respectively; SEQ ID NOs: 953 and 957 respectively; SEQ ID NOs: 961 and 965 respectively; SEQ ID NOs: 977 and 981 respectively; SEQ ID NOs: 985 and 989 respectively; SEQ ID NOs: 993 and 997 respectively; SEQ ID NOs: 1001 and 1005 respectively; SEQ ID NOs: 1009 and 1013 respectively; SEQ ID NOs: 1017 and 1021 respectively; SEQ ID NOs: 1025 and 1029 respectively; SEQ ID NOs: 1033 and 1037 respectively; SEQ ID NOs: 1041 and 1045 respectively; SEQ ID NOs: 1065 and 1069 respectively; SEQ ID NOs: 1073 and 1077 respectively; SEQ ID NOs: 1081 and 1085 respectively; SEQ ID NOs: 1089 and 1093 respectively; SEQ ID NOs: 1097 and 1101 respectively; SEQ ID NOs: 1113 and 1117 respectively; SEQ ID NOs: 1121 and 1125 respectively; SEQ ID NOs: 1129 and 1133 respectively; SEQ ID NOs: 1137 and 1141 respectively; SEQ ID NOs: 1145 and 1149 respectively; SEQ ID NOs: 1153 and 1157 respectively; SEQ ID NOs: 1161 and 1165 respectively; SEQ ID NOs: 1169 and 1173 respectively; SEQ ID NOs: 1185 and 1189 respectively; SEQ ID NOs: 1193 and 1197 respectively; SEQ ID NOs: 1201 and 1205 respectively; SEQ ID NOs: 1209 and 1213 respectively; SEQ ID NOs: 1217 and 1221 respectively; SEQ ID NOs: 1225 and 1229 respectively; SEQ ID NOs: 1233 and 1237 respectively; SEQ ID NOs: 1241 and 1245 respectively; SEQ ID NOs: 1249 and 1253 respectively; SEQ ID NOs: 1257 and 1261 respectively; SEQ ID NOs: 1265 and 1269 respectively; SEQ ID NOs: 1273 and 1277 respectively; SEQ ID NOs: 1281 and 1285 respectively; SEQ ID NOs: 1289 and 1293 respectively; SEQ ID NOs: 1297 and 1301 respectively; SEQ ID NOs: 1305 and 1309 respectively; SEQ ID NOs: 1313 and 1317 respectively; SEQ ID NOs: 1321 and 1325 respectively; SEQ ID NOs: 1329 and 1333 respectively; SEQ ID NOs: 1337 and 1341 respectively; SEQ ID NOs: 1345 and 1349 respectively; SEQ ID NOs: 1353 and 1357 respectively; SEQ ID NOs: 1361 and 1365 respectively; SEQ ID NOs: 1369 and 1373 respectively; SEQ ID NOs: 1377 and 1381 respectively; SEQ ID NOs: 1385 and 1389 respectively; SEQ ID NOs: 1393 and 1397 respectively; SEQ ID NOs: 1401 and 1405 respectively; SEQ ID NOs: 1409 and 1413 respectively; SEQ ID NOs: 1417 and 1421 respectively; SEQ ID NOs: 1433 and 1437 respectively; SEQ ID NOs: 1441 and 1445 respectively; SEQ ID NOs: 1457 and 1461 respectively; SEQ ID NOs: 1465 and 1469 respectively; SEQ ID NOs: 1473 and 1477 respectively; SEQ ID NOs: 1481 and 1485 respectively; SEQ ID NOs: 1489 and 1493 respectively; SEQ ID NOs: 1497 and 1501 respectively; SEQ ID NOs: 1505 and 1509 respectively; SEQ ID NOs: 1513 and 1517 respectively; SEQ ID NOs: 1521 and 1525 respectively; SEQ ID NOs: 1529 and 1533 respectively; SEQ ID NOs: 1545 and 1549 respectively; SEQ ID NOs: 1553 and 1557 respectively; SEQ ID NOs: 1561 and 1565 respectively; SEQ ID NOs: 1569 and 1573 respectively; SEQ ID NOs: 1577 and 1581 respectively; SEQ ID NOs: 1585 and 1589 respectively; SEQ ID NOs: 1593 and 1597 respectively; SEQ ID NOs: 1601 and 1605 respectively; SEQ ID NOs: 1609 and 1613 respectively; SEQ ID NOs: 1617 and 1621 respectively; SEQ ID NOs: 1625 and 1629 respectively; SEQ ID NOs: 1633 and 1637 respectively; SEQ ID NOs: 1649 and 1653 respectively; SEQ ID NOs: 1657 and 1661 respectively; SEQ ID NOs: 1673 and 1677 respectively; SEQ ID NOs: 1681 and 1685 respectively; SEQ ID NOs: 1689 and 1693 respectively; SEQ ID NOs: 1697 and 1701 respectively; SEQ ID NOs: 1705 and 1709 respectively; SEQ ID NOs: 1713 and 1717 respectively; SEQ ID NOs: 1721 and 1725 respectively; SEQ ID NOs: 1729 and 1733 respectively; SEQ ID NOs: 1737 and 1741 respectively; SEQ ID NOs: 1745 and 1749 respectively; SEQ ID NOs: 1753 and 1757 respectively; SEQ ID NOs: 1761 and 1765 respectively; SEQ ID NOs: 1769 and 1773 respectively; SEQ ID NOs: 1777 and 1781 respectively; SEQ ID NOs: 1785 and 1789 respectively; SEQ ID NOs: 1793 and 1797 respectively; SEQ ID NOs: 1801 and 1805 respectively; SEQ ID NOs: 1809 and 1813 respectively; SEQ ID NOs: 1817 and 1821 respectively; SEQ ID NOs: 1833 and 1837 respectively; SEQ ID NOs: 1841 and 1845 respectively; SEQ ID NOs: 1849 and 1853 respectively; SEQ ID NOs: 1857 and 1861 respectively; SEQ ID NOs: 1865 and 1869 respectively; SEQ ID NOs: 1873 and 1877 respectively; SEQ ID NOs: 1881 and 1885 respectively; SEQ ID NOs: 1889 and 1893 respectively; SEQ ID NOs: 1913 and 1917 respectively; SEQ ID NOs: 1937 and 1941 respectively; SEQ ID NOs: 1945 and 1949 respectively; SEQ ID NOs: 1953 and 1957 respectively; SEQ ID NOs: 1961 and 1965 respectively; SEQ ID NOs: 1969 and 1973 respectively; SEQ ID NOs: 1977 and 1981 respectively; SEQ ID NOs: 1985 and 1989 respectively; SEQ ID NOs: 1993 and 1997 respectively; SEQ ID NOs: 2001 and 2005 respectively; SEQ ID NOs: 2009 and 2013 respectively; SEQ ID NOs: 2017 and 2021 respectively; SEQ ID NOs: 2025 and 2029 respectively; SEQ ID NOs: 2033 and 2037 respectively; SEQ ID NOs: 2041 and 2045 respectively; SEQ ID NOs: 2049 and 2053 respectively; SEQ ID NOs: 2057 and 2061 respectively; SEQ ID NOs: 2065 and 2069 respectively; SEQ ID NOs: 2073 and 2077 respectively; SEQ ID NOs: 2081 and 2085 respectively; SEQ ID NOs: 2089 and 2093 respectively; SEQ ID NOs: 2097 and 2101 respectively; SEQ ID NOs: 2105 and 2109 respectively; SEQ ID NOs: 2113 and 2117 respectively; SEQ ID NOs: 2121 and 2125 respectively; SEQ ID NOs: 2129 and 2133 respectively; SEQ ID NOs: 2137 and 2141 respectively; SEQ ID NOs: 2145 and 2149 respectively; SEQ ID NOs: 2153 and 2157 respectively; SEQ ID NOs: 2161 and 2165 respectively; SEQ ID NOs: 2169 and 2173 respectively; SEQ ID NOs: 2177 and 2181 respectively; SEQ ID NOs: 2185 and 2189 respectively; SEQ ID NOs: 2193 and 2197 respectively; SEQ ID NOs: 2201 and 2205 respectively; SEQ ID NOs: 2209 and 2213 respectively; SEQ ID NOs: 2217 and 2221 respectively; SEQ ID NOs: 2225 and 2229 respectively; SEQ ID NOs: 2233 and 2237 respectively; SEQ ID NOs: 2241 and 2245 respectively; SEQ ID NOs: 2249 and 2253 respectively; SEQ ID NOs: 2257 and 2261 respectively; SEQ ID NOs: 2273 and 2277 respectively; SEQ ID NOs: 2281 and 2285 respectively; SEQ ID NOs: 2305 and 2309 respectively; SEQ ID NOs: 2313 and 2317 respectively; SEQ ID NOs: 2321 and 2325 respectively; SEQ ID NOs: 2329 and 2333 respectively; SEQ ID NOs: 2337 and 2341 respectively; and SEQ ID NOs: 2345 and 2349 respectively.

[0135] Additionally or alternatively, in some embodiments of the heterodimeric multispecific antibodies disclosed herein, each of VL-3 and VH-3 comprise a V_{L} amino acid sequence and a V_{H} amino acid sequence selected from the group consisting of SEQ ID NOs: 1 and 5 respectively; SEQ ID NOs: 9 and 13 respectively; SEQ ID NOs: 17 and 21 respectively; SEQ ID NOs: 25 and 29 respectively; SEQ ID NOs: 33 and 37 respectively; SEQ ID NOs: 41 and 45 respectively; SEQ ID NOs: 49 and 53 respectively; SEQ ID NOs: 57 and 61 respectively; SEQ ID NOs: 73 and 77 respectively; SEQ ID NOs: 89 and 93 respectively; SEQ ID NOs: 97 and 101 respectively; SEQ ID NOs: 105 and 109 respectively; SEQ ID NOs: 113 and 117 respectively; SEQ ID NOs: 121 and 125 respectively; SEQ ID NOs: 129 and 133 respectively; SEQ ID NOs: 145 and 149 respectively; SEQ ID NOs: 161 and 165 respectively; SEQ ID NOs: 169 and 173 respectively; SEQ ID NOs: 177 and 181 respectively; SEQ ID NOs: 193 and 197 respectively; SEQ ID NOs: 201 and 205 respectively; SEQ ID NOs: 233 and 237 respectively; SEQ ID NOs: 241 and 245 respectively; SEQ ID NOs: 257 and 261 respectively; SEQ ID NOs: 273 and 277 respectively; SEQ ID NOs: 281 and 285 respectively; SEQ ID NOs: 289 and 293 respectively; SEQ ID NOs: 297 and 301 respectively; SEQ ID NOs: 305 and 309 respectively; SEQ ID NOs: 313 and 317 respectively; SEQ ID NOs: 321 and 325 respectively; SEQ ID NOs: 329 and 333 respectively; SEQ ID NOs: 337 and 341 respectively; SEQ ID NOs: 345 and 349 respectively; SEQ ID NOs: 353 and 357 respectively; SEQ ID NOs: 361 and 365 respectively; SEQ ID NOs: 369 and 373 respectively; SEQ ID NOs: 377 and 381 respectively; SEQ ID NOs: 385 and 389 respectively; SEQ ID NOs: 393 and 397 respectively; SEQ ID NOs: 401 and 405 respectively; SEQ ID NOs: 409 and 413 respectively; SEQ ID NOs: 417 and 421 respectively; SEQ ID NOs: 425 and 429 respectively; SEQ ID NOs: 433 and 437 respectively; SEQ ID NOs: 441 and 445 respectively; SEQ ID NOs: 449 and 453 respectively; SEQ ID NOs: 457 and 461 respectively; SEQ ID NOs: 465 and 469 respectively; SEQ ID NOs: 481 and 485 respectively; SEQ ID NOs: 489 and 493 respectively; SEQ ID NOs: 497 and 501 respectively; SEQ ID NOs: 521 and 525 respectively; SEQ ID NOs: 529 and 533 respectively; SEQ ID NOs: 537 and 541 respectively; SEQ ID NOs: 545 and 549 respectively; SEQ ID NOs: 553 and 557 respectively; SEQ ID NOs: 561 and 565 respectively; SEQ ID NOs: 609 and 613 respectively; SEQ ID NOs: 617 and 621 respectively; SEQ ID NOs: 681 and 685 respectively; SEQ ID NOs: 689 and 693 respectively; SEQ ID NOs: 697 and 701 respectively; SEQ ID NOs: 705 and 709 respectively; SEQ ID NOs: 713 and 717 respectively; SEQ ID NOs: 721 and 725 respectively; SEQ ID NOs: 729 and 733 respectively; SEQ ID NOs: 737 and 741 respectively; SEQ ID NOs: 745 and 749 respectively; SEQ ID NOs: 753 and 757 respectively; SEQ ID NOs: 761 and 765 respectively; SEQ ID NOs: 769 and 773 respectively; SEQ ID NOs: 785 and 789 respectively; SEQ ID NOs: 793 and 797 respectively; SEQ ID NOs: 801 and 805 respectively; SEQ ID NOs: 809 and 813 respectively; SEQ ID NOs: 817 and 821 respectively; SEQ ID NOs: 825 and 829 respectively; SEQ ID NOs: 833 and 837 respectively; SEQ ID NOs: 841 and 845 respectively; SEQ ID NOs: 849 and 853 respectively; SEQ ID NOs: 857 and 861 respectively; SEQ ID NOs: 865 and 869 respectively; SEQ ID NOs: 873 and 877 respectively; SEQ ID NOs: 881 and 885 respectively; SEQ ID NOs: 889 and 893 respectively; SEQ ID NOs: 945 and 949 respectively; SEQ ID NOs: 953 and 957 respectively; SEQ ID NOs: 961 and 965 respectively; SEQ ID NOs: 977 and 981 respectively; SEQ ID NOs: 985 and 989 respectively; SEQ ID NOs: 993 and 997 respectively; SEQ ID NOs: 1001 and 1005 respectively; SEQ ID NOs: 1009 and 1013 respectively; SEQ ID NOs: 1017 and 1021 respectively; SEQ ID NOs: 1025 and 1029 respectively; SEQ ID NOs: 1033 and 1037 respectively; SEQ ID NOs: 1041 and 1045 respectively; SEQ ID NOs: 1065 and 1069 respectively; SEQ ID NOs: 1073 and 1077 respectively; SEQ ID NOs: 1081 and 1085 respectively; SEQ ID NOs: 1089 and 1093 respectively; SEQ ID NOs: 1097 and 1101 respectively; SEQ ID NOs: 1113 and 1117 respectively; SEQ ID NOs: 1121 and 1125 respectively; SEQ ID NOs: 1129 and 1133 respectively; SEQ ID NOs: 1137 and 1141 respectively; SEQ ID NOs: 1145 and 1149 respectively; SEQ ID NOs: 1153 and 1157 respectively; SEQ ID NOs: 1161 and 1165 respectively; SEQ ID NOs: 1169 and 1173 respectively; SEQ ID NOs: 1185 and 1189 respectively; SEQ ID NOs: 1193 and 1197 respectively; SEQ ID NOs: 1201 and 1205 respectively; SEQ ID NOs: 1209 and 1213 respectively; SEQ ID NOs: 1217 and 1221 respectively; SEQ ID NOs: 1225 and 1229 respectively; SEQ ID NOs: 1233 and 1237 respectively; SEQ ID NOs: 1241 and 1245 respectively; SEQ ID NOs: 1249 and 1253 respectively; SEQ ID NOs: 1257 and 1261 respectively; SEQ ID NOs: 1265 and 1269 respectively; SEQ ID NOs: 1273 and 1277 respectively; SEQ ID NOs: 1281 and 1285 respectively; SEQ ID NOs: 1289 and 1293 respectively; SEQ ID NOs: 1297 and 1301 respectively; SEQ ID NOs: 1305 and 1309 respectively; SEQ ID NOs: 1313 and 1317 respectively; SEQ ID NOs: 1321 and 1325 respectively; SEQ ID NOs: 1329 and 1333 respectively; SEQ ID NOs: 1337 and 1341 respectively; SEQ ID NOs: 1345 and 1349 respectively; SEQ ID NOs: 1353 and 1357 respectively; SEQ ID NOs: 1361 and 1365 respectively; SEQ ID NOs: 1369 and 1373 respectively; SEQ ID NOs: 1377 and 1381 respectively; SEQ ID NOs: 1385 and 1389 respectively; SEQ ID NOs: 1393 and 1397 respectively; SEQ ID NOs: 1401 and 1405 respectively; SEQ ID NOs: 1409 and 1413 respectively; SEQ ID NOs: 1417 and 1421 respectively; SEQ ID NOs: 1433 and 1437 respectively; SEQ ID NOs: 1441 and 1445 respectively; SEQ ID NOs: 1457 and 1461 respectively; SEQ ID NOs: 1465 and 1469 respectively; SEQ ID NOs: 1473 and 1477 respectively; SEQ ID NOs: 1481 and 1485 respectively; SEQ ID NOs: 1489 and 1493 respectively; SEQ ID NOs: 1497 and 1501 respectively; SEQ ID NOs: 1505 and 1509 respectively; SEQ ID NOs: 1513 and 1517 respectively; SEQ ID NOs: 1521 and 1525 respectively; SEQ ID NOs: 1529 and 1533 respectively; SEQ ID NOs: 1545 and 1549 respectively; SEQ ID NOs: 1553 and 1557 respectively; SEQ ID NOs: 1561 and 1565 respectively; SEQ ID NOs: 1569 and 1573 respectively; SEQ ID NOs: 1577 and 1581 respectively; SEQ ID NOs: 1585 and 1589 respectively; SEQ ID NOs: 1593 and 1597 respectively; SEQ ID NOs: 1601 and 1605 respectively; SEQ ID NOs: 1609 and 1613 respectively; SEQ ID NOs: 1617 and 1621 respectively; SEQ ID NOs: 1625 and 1629 respectively; SEQ ID NOs: 1633 and 1637 respectively; SEQ ID NOs: 1649 and 1653 respectively; SEQ ID NOs: 1657 and 1661 respectively; SEQ ID NOs: 1673 and 1677 respectively; SEQ ID NOs: 1681 and 1685 respectively; SEQ ID NOs: 1689 and 1693 respectively; SEQ ID NOs: 1697 and 1701 respectively; SEQ ID NOs: 1705 and 1709 respectively; SEQ ID NOs: 1713 and 1717 respectively; SEQ ID NOs: 1721 and 1725 respectively; SEQ ID NOs: 1729 and 1733 respectively; SEQ ID NOs: 1737 and 1741 respectively; SEQ ID NOs: 1745 and 1749 respectively; SEQ ID NOs: 1753 and 1757 respectively; SEQ ID NOs: 1761 and 1765 respectively; SEQ ID NOs: 1769 and 1773 respectively; SEQ ID NOs: 1777 and 1781 respectively; SEQ ID NOs: 1785 and 1789 respectively; SEQ ID NOs: 1793 and 1797 respectively; SEQ ID NOs: 1801 and 1805 respectively; SEQ ID NOs: 1809 and 1813 respectively; SEQ ID NOs: 1817 and 1821 respectively; SEQ ID NOs: 1833 and 1837 respectively; SEQ ID NOs: 1841 and 1845 respectively; SEQ ID NOs: 1849 and 1853 respectively; SEQ ID NOs: 1857 and 1861 respectively; SEQ ID NOs: 1865 and 1869 respectively; SEQ ID NOs: 1873 and 1877 respectively; SEQ ID NOs: 1881 and 1885 respectively; SEQ ID NOs: 1889 and 1893 respectively; SEQ ID NOs: 1913 and 1917 respectively; SEQ ID NOs: 1937 and 1941 respectively; SEQ ID NOs: 1945 and 1949 respectively; SEQ ID NOs: 1953 and 1957 respectively; SEQ ID NOs: 1961 and 1965 respectively; SEQ ID NOs: 1969 and 1973 respectively; SEQ ID NOs: 1977 and 1981 respectively; SEQ ID NOs: 1985 and 1989 respectively; SEQ ID NOs: 1993 and 1997 respectively; SEQ ID NOs: 2001 and 2005 respectively; SEQ ID NOs: 2009 and 2013 respectively; SEQ ID NOs: 2017 and 2021 respectively; SEQ ID NOs: 2025 and 2029 respectively; SEQ ID NOs: 2033 and 2037 respectively; SEQ ID NOs: 2041 and 2045 respectively; SEQ ID NOs: 2049 and 2053 respectively; SEQ ID NOs: 2057 and 2061 respectively; SEQ ID NOs: 2065 and 2069 respectively; SEQ ID NOs: 2073 and 2077 respectively; SEQ ID NOs: 2081 and 2085 respectively; SEQ ID NOs: 2089 and 2093 respectively; SEQ ID NOs: 2097 and 2101 respectively; SEQ ID NOs: 2105 and 2109 respectively; SEQ ID NOs: 2113 and 2117 respectively; SEQ ID NOs: 2121 and 2125 respectively; SEQ ID NOs: 2129 and 2133 respectively; SEQ ID NOs: 2137 and 2141 respectively; SEQ ID NOs: 2145 and 2149 respectively; SEQ ID NOs: 2153 and 2157 respectively; SEQ ID NOs: 2161 and 2165 respectively; SEQ ID NOs: 2169 and 2173 respectively; SEQ ID NOs: 2177 and 2181 respectively; SEQ ID NOs: 2185 and 2189 respectively; SEQ ID NOs: 2193 and 2197 respectively; SEQ ID NOs: 2201 and 2205 respectively; SEQ ID NOs: 2209 and 2213 respectively; SEQ ID NOs: 2217 and 2221 respectively; SEQ ID NOs: 2225 and 2229 respectively; SEQ ID NOs: 2233 and 2237 respectively; SEQ ID NOs: 2241 and 2245 respectively; SEQ ID NOs: 2249 and 2253 respectively; SEQ ID NOs: 2257 and 2261 respectively; SEQ ID NOs: 2273 and 2277 respectively; SEQ ID NOs: 2281 and 2285 respectively; SEQ ID NOs: 2305 and 2309 respectively; SEQ ID NOs: 2313 and 2317 respectively; SEQ ID NOs: 2321 and 2325 respectively; SEQ ID NOs: 2329 and 2333 respectively; SEQ ID NOs: 2337 and 2341 respectively; and SEQ ID NOs: 2345 and 2349 respectively.

[0136] Additionally or alternatively, in some embodiments of the heterodimeric multispecific antibodies disclosed herein, each of VL-1 and VH-1 comprise a V_{L} amino acid sequence and a V_{H} amino acid sequence selected from the group consisting of SEQ ID NOs: 9 and 13 respectively; SEQ ID NOs: 49 and 53 respectively; SEQ ID NOs: 57 and 61 respectively; SEQ ID NOs: 65 and 69 respectively; SEQ ID NOs: 81 and 85 respectively; SEQ ID NOs: 153 and 157 respectively; SEQ ID NOs: 161 and 165 respectively; SEQ ID NOs: 193 and 197 respectively; SEQ ID NOs: 201 and 205 respectively; SEQ ID NOs: 273 and 277 respectively; SEQ ID NOs: 281 and 285 respectively; SEQ ID NOs: 289 and 293 respectively; SEQ ID NOs: 297 and 301 respectively; SEQ ID NOs: 305 and 309 respectively; SEQ ID NOs: 313 and 317 respectively; SEQ ID NOs: 361 and 365 respectively; SEQ ID NOs: 377 and 381 respectively; SEQ ID NOs: 393 and 397 respectively; SEQ ID NOs: 401 and 405 respectively; SEQ ID NOs: 409 and 413 respectively; SEQ ID NOs: 417 and 421 respectively; SEQ ID NOs: 425 and 429 respectively; SEQ ID NOs: 433 and 437 respectively; SEQ ID NOs: 441 and 445 respectively; SEQ ID NOs: 449 and 453 respectively; SEQ ID NOs: 457 and 461 respectively; SEQ ID NOs: 465 and 469 respectively; SEQ ID NOs: 681 and 685 respectively; SEQ ID NOs: 689 and 693 respectively; SEQ ID NOs: 697 and 701 respectively; SEQ ID NOs: 705 and 709 respectively; SEQ ID NOs: 713 and 717 respectively; SEQ ID NOs: 721 and 725 respectively; SEQ ID NOs: 737 and 741 respectively; SEQ ID NOs: 745 and 749 respectively; SEQ ID NOs: 753 and 757 respectively; SEQ ID NOs: 761 and 765 respectively; SEQ ID NOs: 777 and 781 respectively; SEQ ID NOs: 825 and 829 respectively; SEQ ID NOs: 833 and 837 respectively; SEQ ID NOs: 841 and 845 respectively; SEQ ID NOs: 953 and 957 respectively; SEQ ID NOs: 961 and 965 respectively; SEQ ID NOs: 977 and 981 respectively; SEQ ID NOs: 993 and 997 respectively; SEQ ID NOs: 1001 and 1005 respectively; SEQ ID NOs: 1009 and 1013 respectively; SEQ ID NOs: 1017 and 1021 respectively; SEQ ID NOs: 1033 and 1037 respectively; SEQ ID NOs: 1049 and 1053 respectively; SEQ ID NOs: 1073 and 1077 respectively; SEQ ID NOs: 1081 and 1085 respectively; SEQ ID NOs: 1089 and 1093 respectively; SEQ ID NOs: 1105 and 1109 respectively; SEQ ID NOs: 1129 and 1133 respectively; SEQ ID NOs: 1137 and 1141 respectively; SEQ ID NOs: 1153 and 1157 respectively; SEQ ID NOs: 1161 and 1165 respectively; SEQ ID NOs: 1177 and 1181 respectively; SEQ ID NOs: 1225 and 1229 respectively; SEQ ID NOs: 1241 and 1245 respectively; SEQ ID NOs: 1257 and 1261 respectively; SEQ ID NOs: 1265 and 1269 respectively; SEQ ID NOs: 1297 and 1301 respectively; SEQ ID NOs: 1393 and 1397 respectively; SEQ ID NOs: 1409 and 1413 respectively; SEQ ID NOs: 1425 and 1429 respectively; SEQ ID NOs: 1441 and 1445 respectively; SEQ ID NOs: 1449 and 1453 respectively; SEQ ID NOs: 1457 and 1461 respectively; SEQ ID NOs: 1465 and 1469 respectively; SEQ ID NOs: 1473 and 1477 respectively; SEQ ID NOs: 1481 and 1485 respectively; SEQ ID NOs: 1497 and 1501 respectively; SEQ ID NOs: 1505 and 1509 respectively; SEQ ID NOs: 1513 and 1517 respectively; SEQ ID NOs: 1521 and 1525 respectively; SEQ ID NOs: 1529 and 1533 respectively; SEQ ID NOs: 1545 and 1549 respectively; SEQ ID NOs: 1553 and 1557 respectively; SEQ ID NOs: 1561 and 1565 respectively; SEQ ID NOs: 1569 and 1573 respectively; SEQ ID NOs: 1577 and 1581 respectively; SEQ ID NOs: 1585 and 1589 respectively; SEQ ID NOs: 1609 and 1613 respectively; SEQ ID NOs: 1617 and 1621 respectively; SEQ ID NOs: 1649 and 1653 respectively; SEQ ID NOs: 1657 and 1661 respectively; SEQ ID NOs: 1673 and 1677 respectively; SEQ ID NOs: 1689 and 1693 respectively; SEQ ID NOs: 1697 and 1701 respectively; SEQ ID NOs: 1705 and 1709 respectively; SEQ ID NOs: 1713 and 1717 respectively; SEQ ID NOs: 1721 and 1725 respectively; SEQ ID NOs: 1729 and 1733 respectively; SEQ ID NOs: 1745 and 1749 respectively; SEQ ID NOs: 1753 and 1757 respectively; SEQ ID NOs: 1761 and 1765 respectively; SEQ ID NOs: 1769 and 1773 respectively; SEQ ID NOs: 1777 and 1781 respectively; SEQ ID NOs: 1785 and 1789 respectively; SEQ ID NOs: 1793 and 1797 respectively; SEQ ID NOs: 1817 and 1821 respectively; SEQ ID NOs: 1833 and 1837 respectively; SEQ ID NOs: 1841 and 1845 respectively; SEQ ID NOs: 1849 and 1853 respectively; SEQ ID NOs: 1857 and 1861 respectively; SEQ ID NOs: 1865 and 1869 respectively; SEQ ID NOs: 1889 and 1893 respectively; SEQ ID NOs: 2257 and 2261 respectively; SEQ ID NOs: 2265 and 2269 respectively; SEQ ID NOs: 2281 and 2285 respectively; SEQ ID NOs: 2297 and 2301 respectively; SEQ ID NOs: 2305 and 2309 respectively; SEQ ID NOs: 2313 and 2317 respectively; SEQ ID NOs: 2321 and 2325 respectively; SEQ ID NOs: 2329 and 2333 respectively; SEQ ID NOs: 2337 and 2341 respectively; and SEQ ID NOs: 2345 and 2349 respectively.

[0137] Additionally or alternatively, in some embodiments of the heterodimeric multispecific antibodies disclosed herein, each of VL-3 and VH-3 comprise a V_{L} amino acid sequence and a V_{H} amino acid sequence selected from the group consisting of SEQ ID NOs: 9 and 13 respectively; SEQ ID NOs: 49 and 53 respectively; SEQ ID NOs: 57 and 61 respectively; SEQ ID NOs: 65 and 69 respectively; SEQ ID NOs: 81 and 85 respectively; SEQ ID NOs: 153 and 157 respectively; SEQ ID NOs: 161 and 165 respectively; SEQ ID NOs: 193 and 197 respectively; SEQ ID NOs: 201 and 205 respectively; SEQ ID NOs: 273 and 277 respectively; SEQ ID NOs: 281 and 285 respectively; SEQ ID NOs: 289 and 293 respectively; SEQ ID NOs: 297 and 301 respectively; SEQ ID NOs: 305 and 309 respectively; SEQ ID NOs: 313 and 317 respectively; SEQ ID NOs: 361 and 365 respectively; SEQ ID NOs: 377 and 381 respectively; SEQ ID NOs: 393 and 397 respectively; SEQ ID NOs: 401 and 405 respectively; SEQ ID NOs: 409 and 413 respectively; SEQ ID NOs: 417 and 421 respectively; SEQ ID NOs: 425 and 429 respectively; SEQ ID NOs: 433 and 437 respectively; SEQ ID NOs: 441 and 445 respectively; SEQ ID NOs: 449 and 453 respectively; SEQ ID NOs: 457 and 461 respectively; SEQ ID NOs: 465 and 469 respectively; SEQ ID NOs: 681 and 685 respectively; SEQ ID NOs: 689 and 693 respectively; SEQ ID NOs: 697 and 701 respectively; SEQ ID NOs: 705 and 709 respectively; SEQ ID NOs: 713 and 717 respectively; SEQ ID NOs: 721 and 725 respectively; SEQ ID NOs: 737 and 741 respectively; SEQ ID NOs: 745 and 749 respectively; SEQ ID NOs: 753 and 757 respectively; SEQ ID NOs: 761 and 765 respectively; SEQ ID NOs: 777 and 781 respectively; SEQ ID NOs: 825 and 829 respectively; SEQ ID NOs: 833 and 837 respectively; SEQ ID NOs: 841 and 845 respectively; SEQ ID NOs: 953 and 957 respectively; SEQ ID NOs: 961 and 965 respectively; SEQ ID NOs: 977 and 981 respectively; SEQ ID NOs: 993 and 997 respectively; SEQ ID NOs: 1001 and 1005 respectively; SEQ ID NOs: 1009 and 1013 respectively; SEQ ID NOs: 1017 and 1021 respectively; SEQ ID NOs: 1033 and 1037 respectively; SEQ ID NOs: 1049 and 1053 respectively; SEQ ID NOs: 1073 and 1077 respectively; SEQ ID NOs: 1081 and 1085 respectively; SEQ ID NOs: 1089 and 1093 respectively; SEQ ID NOs: 1105 and 1109 respectively; SEQ ID NOs: 1129 and 1133 respectively; SEQ ID NOs: 1137 and 1141 respectively; SEQ ID NOs: 1153 and 1157 respectively; SEQ ID NOs: 1161 and 1165 respectively; SEQ ID NOs: 1177 and 1181 respectively; SEQ ID NOs: 1225 and 1229 respectively; SEQ ID NOs: 1241 and 1245 respectively; SEQ ID NOs: 1257 and 1261 respectively; SEQ ID NOs: 1265 and 1269 respectively; SEQ ID NOs: 1297 and 1301 respectively; SEQ ID NOs: 1393 and 1397 respectively; SEQ ID NOs: 1409 and 1413 respectively; SEQ ID NOs: 1425 and 1429 respectively; SEQ ID NOs: 1441 and 1445 respectively; SEQ ID NOs: 1449 and 1453 respectively; SEQ ID NOs: 1457 and 1461 respectively; SEQ ID NOs: 1465 and 1469 respectively; SEQ ID NOs: 1473 and 1477 respectively; SEQ ID NOs: 1481 and 1485 respectively; SEQ ID NOs: 1497 and 1501 respectively; SEQ ID NOs: 1505 and 1509 respectively; SEQ ID NOs: 1513 and 1517 respectively; SEQ ID NOs: 1521 and 1525 respectively; SEQ ID NOs: 1529 and 1533 respectively; SEQ ID NOs: 1545 and 1549 respectively; SEQ ID NOs: 1553 and 1557 respectively; SEQ ID NOs: 1561 and 1565 respectively; SEQ ID NOs: 1569 and 1573 respectively; SEQ ID NOs: 1577 and 1581 respectively; SEQ ID NOs: 1585 and 1589 respectively; SEQ ID NOs: 1609 and 1613 respectively; SEQ ID NOs: 1617 and 1621 respectively; SEQ ID NOs: 1649 and 1653 respectively; SEQ ID NOs: 1657 and 1661 respectively; SEQ ID NOs: 1673 and 1677 respectively; SEQ ID NOs: 1689 and 1693 respectively; SEQ ID NOs: 1697 and 1701 respectively; SEQ ID NOs: 1705 and 1709 respectively; SEQ ID NOs: 1713 and 1717 respectively; SEQ ID NOs: 1721 and 1725 respectively; SEQ ID NOs: 1729 and 1733 respectively; SEQ ID NOs: 1745 and 1749 respectively; SEQ ID NOs: 1753 and 1757 respectively; SEQ ID NOs: 1761 and 1765 respectively; SEQ ID NOs: 1769 and 1773 respectively; SEQ ID NOs: 1777 and 1781 respectively; SEQ ID NOs: 1785 and 1789 respectively; SEQ ID NOs: 1793 and 1797 respectively; SEQ ID NOs: 1817 and 1821 respectively; SEQ ID NOs: 1833 and 1837 respectively; SEQ ID NOs: 1841 and 1845 respectively; SEQ ID NOs: 1849 and 1853 respectively; SEQ ID NOs: 1857 and 1861 respectively; SEQ ID NOs: 1865 and 1869 respectively; SEQ ID NOs: 1889 and 1893 respectively; SEQ ID NOs: 2257 and 2261 respectively; SEQ ID NOs: 2265 and 2269 respectively; SEQ ID NOs: 2281 and 2285 respectively; SEQ ID NOs: 2297 and 2301 respectively; SEQ ID NOs: 2305 and 2309 respectively; SEQ ID NOs: 2313 and 2317 respectively; SEQ ID NOs: 2321 and 2325 respectively; SEQ ID NOs: 2329 and 2333 respectively; SEQ ID NOs: 2337 and 2341 respectively; and SEQ ID NOs: 2345 and 2349 respectively.

[0138] Additionally or alternatively, in some embodiments of the heterodimeric multispecific antibodies disclosed herein, each of VL-2 and VH-2 comprise a V_{L} amino acid sequence and a V_{H} amino acid sequence selected from the group consisting of SEQ ID NOs: 17 and 21 respectively; SEQ ID NOs: 25 and 29 respectively; SEQ ID NOs: 33 and 37 respectively; SEQ ID NOs: 41 and 45 respectively; SEQ ID NOs: 121 and 125 respectively; SEQ ID NOs: 137 and 141 respectively; SEQ ID NOs: 169 and 173 respectively; SEQ ID NOs: 177 and 181 respectively; SEQ ID NOs: 185 and 189 respectively; SEQ ID NOs: 193 and 197 respectively; SEQ ID NOs: 201 and 205 respectively; SEQ ID NOs: 209 and 213 respectively; SEQ ID NOs: 217 and 221 respectively; SEQ ID NOs: 225 and 229 respectively; SEQ ID NOs: 233 and 237 respectively; SEQ ID NOs: 241 and 245 respectively; SEQ ID NOs: 249 and 253 respectively; SEQ ID NOs: 257 and 261 respectively; SEQ ID NOs: 265 and 269 respectively; SEQ ID NOs: 321 and 325 respectively; SEQ ID NOs: 329 and 333 respectively; SEQ ID NOs: 337 and 341 respectively; SEQ ID NOs: 393 and 397 respectively; SEQ ID NOs: 401 and 405 respectively; SEQ ID NOs: 409 and 413 respectively; SEQ ID NOs: 473 and 477 respectively; SEQ ID NOs: 481 and 485 respectively; SEQ ID NOs: 489 and 493 respectively; SEQ ID NOs: 497 and 501 respectively; SEQ ID NOs: 505 and 509 respectively; SEQ ID NOs: 513 and 517 respectively; SEQ ID NOs: 545 and 549 respectively; SEQ ID NOs: 553 and 557 respectively; SEQ ID NOs: 561 and 565 respectively; SEQ ID NOs: 569 and 573 respectively; SEQ ID NOs: 577 and 581 respectively; SEQ ID NOs: 585 and 589 respectively; SEQ ID NOs: 593 and 597 respectively; SEQ ID NOs: 601 and 605 respectively; SEQ ID NOs: 625 and 629 respectively; SEQ ID NOs: 633 and 637 respectively; SEQ ID NOs: 641 and 645 respectively; SEQ ID NOs: 649 and 653 respectively; SEQ ID NOs: 657 and 661 respectively; SEQ ID NOs: 665 and 669 respectively; SEQ ID NOs: 673 and 677 respectively; SEQ ID NOs: 681 and 685 respectively; SEQ ID NOs: 689 and 693 respectively; SEQ ID NOs: 697 and 701 respectively; SEQ ID NOs: 705 and 709 respectively; SEQ ID NOs: 713 and 717 respectively; SEQ ID NOs: 721 and 725 respectively; SEQ ID NOs: 729 and 733 respectively; SEQ ID NOs: 737 and 741 respectively; SEQ ID NOs: 745 and 749 respectively; SEQ ID NOs: 753 and 757 respectively; SEQ ID NOs: 761 and 765 respectively; SEQ ID NOs: 769 and 773 respectively; SEQ ID NOs: 785 and 789 respectively; SEQ ID NOs: 793 and 797 respectively; SEQ ID NOs: 801 and 805 respectively; SEQ ID NOs: 809 and 813 respectively; SEQ ID NOs: 817 and 821 respectively; SEQ ID NOs: 849 and 853 respectively; SEQ ID NOs: 857 and 861 respectively; SEQ ID NOs: 865 and 869 respectively; SEQ ID NOs: 873 and 877 respectively; SEQ ID NOs: 881 and 885 respectively; SEQ ID NOs: 889 and 893 respectively; SEQ ID NOs: 897 and 901 respectively; SEQ ID NOs: 905 and 909 respectively; SEQ ID NOs: 913 and 917 respectively; SEQ ID NOs: 921 and 925 respectively; SEQ ID NOs: 929 and 933 respectively; SEQ ID NOs: 937 and 941 respectively; SEQ ID NOs: 945 and 949 respectively; SEQ ID NOs: 969 and 973 respectively; SEQ ID NOs: 977 and 981 respectively; SEQ ID NOs: 1009 and 1013 respectively; SEQ ID NOs: 1057 and 1061 respectively; SEQ ID NOs: 1537 and 1541 respectively; SEQ ID NOs: 1569 and 1573 respectively; SEQ ID NOs: 1601 and 1605 respectively; SEQ ID NOs: 1641 and 1645 respectively; SEQ ID NOs: 1665 and 1669 respectively; SEQ ID NOs: 1825 and 1829 respectively; SEQ ID NOs: 1865 and 1869 respectively; SEQ ID NOs: 1897 and 1901 respectively; SEQ ID NOs: 1905 and 1909 respectively; SEQ ID NOs: 1913 and 1917 respectively; SEQ ID NOs: 1921 and 1925 respectively; SEQ ID NOs: 1929 and 1933 respectively; SEQ ID NOs: 2265 and 2269 respectively; SEQ ID NOs: 2281 and 2285 respectively; 2289 and 2293 respectively; 2329 and 2333 respectively; and SEQ ID NOs: 2345 and 2349, respectively.

[0139] Additionally or alternatively, in some embodiments of the heterodimeric multispecific antibodies disclosed herein, each of VL-4 and VH-4 comprise a V_{L} amino acid sequence and a V_{H} amino acid sequence selected from the group consisting of SEQ ID NOs: 17 and 21 respectively; SEQ ID NOs: 25 and 29 respectively; SEQ ID NOs: 33 and 37 respectively; SEQ ID NOs: 41 and 45 respectively; SEQ ID NOs: 121 and 125 respectively; SEQ ID NOs: 137 and 141 respectively; SEQ ID NOs: 169 and 173 respectively; SEQ ID NOs: 177 and 181 respectively; SEQ ID NOs: 185 and 189 respectively; SEQ ID NOs: 193 and 197 respectively; SEQ ID NOs: 201 and 205 respectively; SEQ ID NOs: 209 and 213 respectively; SEQ ID NOs: 217 and 221 respectively; SEQ ID NOs: 225 and 229 respectively; SEQ ID NOs: 233 and 237 respectively; SEQ ID NOs: 241 and 245 respectively; SEQ ID NOs: 249 and 253 respectively; SEQ ID NOs: 257 and 261 respectively; SEQ ID NOs: 265 and 269 respectively; SEQ ID NOs: 321 and 325 respectively; SEQ ID NOs: 329 and 333 respectively; SEQ ID NOs: 337 and 341 respectively; SEQ ID NOs: 393 and 397 respectively; SEQ ID NOs: 401 and 405 respectively; SEQ ID NOs: 409 and 413 respectively; SEQ ID NOs: 473 and 477 respectively; SEQ ID NOs: 481 and 485 respectively; SEQ ID NOs: 489 and 493 respectively; SEQ ID NOs: 497 and 501 respectively; SEQ ID NOs: 505 and 509 respectively; SEQ ID NOs: 513 and 517 respectively; SEQ ID NOs: 545 and 549 respectively; SEQ ID NOs: 553 and 557 respectively; SEQ ID NOs: 561 and 565 respectively; SEQ ID NOs: 569 and 573 respectively; SEQ ID NOs: 577 and 581 respectively; SEQ ID NOs: 585 and 589 respectively; SEQ ID NOs: 593 and 597 respectively; SEQ ID NOs: 601 and 605 respectively; SEQ ID NOs: 625 and 629 respectively; SEQ ID NOs: 633 and 637 respectively; SEQ ID NOs: 641 and 645 respectively; SEQ ID NOs: 649 and 653 respectively; SEQ ID NOs: 657 and 661 respectively; SEQ ID NOs: 665 and 669 respectively; SEQ ID NOs: 673 and 677 respectively; SEQ ID NOs: 681 and 685 respectively; SEQ ID NOs: 689 and 693 respectively; SEQ ID NOs: 697 and 701 respectively; SEQ ID NOs: 705 and 709 respectively; SEQ ID NOs: 713 and 717 respectively; SEQ ID NOs: 721 and 725 respectively; SEQ ID NOs: 729 and 733 respectively; SEQ ID NOs: 737 and 741 respectively; SEQ ID NOs: 745 and 749 respectively; SEQ ID NOs: 753 and 757 respectively; SEQ ID NOs: 761 and 765 respectively; SEQ ID NOs: 769 and 773 respectively; SEQ ID NOs: 785 and 789 respectively; SEQ ID NOs: 793 and 797 respectively; SEQ ID NOs: 801 and 805 respectively; SEQ ID NOs: 809 and 813 respectively; SEQ ID NOs: 817 and 821 respectively; SEQ ID NOs: 849 and 853 respectively; SEQ ID NOs: 857 and 861 respectively; SEQ ID NOs: 865 and 869 respectively; SEQ ID NOs: 873 and 877 respectively; SEQ ID NOs: 881 and 885 respectively; SEQ ID NOs: 889 and 893 respectively; SEQ ID NOs: 897 and 901 respectively; SEQ ID NOs: 905 and 909 respectively; SEQ ID NOs: 913 and 917 respectively; SEQ ID NOs: 921 and 925 respectively; SEQ ID NOs: 929 and 933 respectively; SEQ ID NOs: 937 and 941 respectively; SEQ ID NOs: 945 and 949 respectively; SEQ ID NOs: 969 and 973 respectively; SEQ ID NOs: 977 and 981 respectively; SEQ ID NOs: 1009 and 1013 respectively; SEQ ID NOs: 1057 and 1061 respectively; SEQ ID NOs: 1537 and 1541 respectively; SEQ ID NOs: 1569 and 1573 respectively; SEQ ID NOs: 1601 and 1605 respectively; SEQ ID NOs: 1641 and 1645 respectively; SEQ ID NOs: 1665 and 1669 respectively; SEQ ID NOs: 1825 and 1829 respectively; SEQ ID NOs: 1865 and 1869 respectively; SEQ ID NOs: 1897 and 1901 respectively; SEQ ID NOs: 1905 and 1909 respectively; SEQ ID NOs: 1913 and 1917 respectively; SEQ ID NOs: 1921 and 1925 respectively; SEQ ID NOs: 1929 and 1933 respectively; SEQ ID NOs: 2265 and 2269 respectively; SEQ ID NOs: 2281 and 2285 respectively; 2289 and 2293 respectively; 2329 and 2333 respectively; and SEQ ID NOs: 2345 and 2349, respectively.

[0140] Additionally or alternatively, in some embodiments of the heterodimeric multispecific antibodies disclosed herein, the first immunoglobulin or the third immunoglobulin binds to a cell surface antigen selected from the group consisting of a2b b3 (Glycoprotein IIb/IIIa), a4, a4b7, a4b7+aEb7, a5, Activin receptor type-2B, ALK1, Alpha-synuclein, amyloid beta, APP, AXL, Blood Group A, CAIX, CCL-2, CD105 (endoglin), CD115 (CSF1R), CD116a (CSF2Ra), CD123, CD152 (CTLA4), CD184 (CXCR4), CD19, CD192 (CCR2), CD194 (CCR4), CD195 (CCR5), CD20, CD200, CD22, CD221 (IGF1R), CD248, CD25, CD257 (BAFF), CD26, CD262 (DR5), CD276 (B7H3), CD3, CD30 (TNFRSF8), CD319 (SLAMF7), CD33, CD332 (FGFR2), CD350 (FZD10), CD37, CD371 (CLEC12A), CD38, CD4, CD49b (a2), CD51 (a5), CD52, CD56, CD61 (a4b3), CD70, CD73 (NTSE), CD74, CEA, Claudin-18.2, cMET, CRLR, DLL3, DLL4, DNA/histone (H1) complex, EGFR, EpCAM, EGFR-HER3, EGFRvIII, EphA3, ERGT(GalNAc) Tn Antigen, FLT1, FOLR1, frizzled family receptor (FZD), Lewis Y, Lewis X, GCGR, GD2, GD2 α-acetyl, GD3, GM1, GM1 fucosyl, GM2, GPA33, GPNMB, GUCY2C, HER2, HER3, HGFR (cMET), IgHe, IGLF2, Kallikreins, LINGO1, LOXL2, Ly6/PLAUR domain-containing protein 3, MADCAM1, MAG, Mesothelin, MT1-MMP (MMP14), MUC1, Mucin SAC, NaPi2b, NeuGc-GM3, notch, NOTCH2/NOTCH3 receptors, oxLDL, P-selectin, PCSK9, PDGFRA, PDGFRa, phosphatidylserine, polysialic acid, PSMA, PVRL4, RGMA, CD240D Blood group D antigen, root plate-specific spondin 3, serum amyloid P component, STEAP-1, TACSTD2, TGFb, TWEAKR, TYRP1, VEGFR2, VSIR, CD171 (L1CAM), CD19, CD47, pMHC[NY-ESO1], pMHC[MART1], pMHC[MAGEA1], pMHC[Tyrosinase], pMHC[gp100], pMHC[MUC1], pMHC[tax], pMHC[WT-1], pMHC[EBNA-1], pMHC[LMP2], pMHC[hTERT], GPC3, CD80, CD23, and fibronectin extra domain-B. The first immunoglobulin and the third immunoglobulin may bind to the same epitope on a target cell or two different epitopes on a target cell. In some embodiments, the target cell is a cancer cell.

[0141] Additionally or alternatively, in some embodiments of the heterodimeric multispecific antibodies disclosed herein, the second immunoglobulin or the fourth immunoglobulin bind to an epitope on a white blood cell, a monocyte, a lymphocyte, a granulocyte, a macrophage, a T cell, a NK cell, a B cell, a NKT cell, an ILC, or neutrophil.

[0142] In any of the above embodiments of the heterodimeric multispecific antibodies disclosed herein, the second immunoglobulin or the fourth immunoglobulin bind to an antigen selected from the group consisting of Dabigatran, a4, a4b7, a4b7+aEb7, a5, AXL, BnDOTA, CD11a (LFA-1), CD3, CD4, CD8, CD16, CD19, CD22, CD23, CD25, CD28, CD30 (TNFRSF8), CD33, CD38, CD40, CD40L, CD47, CD49b (a2), CD54 (ICAM-1), CD56, CD74, CD80, CD115 (CSF1R), CD116a (CSF2Ra), CD123, CD134 (OX40), CD137 (41BB), CD152 (CTLA4), CD184 (CXCR4), CD192 (CCR2), CD194 (CCR4), CD195 (CCR5), CD223 (LAG-3), CD252 (OX40L), CD254 (RANKL), CD262 (DR5), CD27, CD200, CD221 (IGF1R), CD248, CD274 (PD-L1), CD275 (ICOS-L), CD278 (ICOS), CD279 (PD-1), CD319 (SLAMF7), CD371 (CLEC12A), MADCAM1, MT1-MMP (MMP14), NKG2A, NRP1,TIGIT, VSIR, KIRDL1/2/3, and KIR2DL2. The second immunoglobulin and the fourth immunoglobulin may bind to the same epitope or different epitopes on a white blood cell, a monocyte, a lymphocyte, a granulocyte, a macrophage, a T cell, a NK cell, a B cell, a NKT cell, an ILC, or neutrophil. In some embodiments, the second immunoglobulin binds CD3 and the fourth immunoglobulin binds an immune cell receptor selected from the group consisting of CD4, CD8, CD25, CD28, CTLA4, OX40, ICOS, PD-1, PD-L1, 41BB, CD2, CD69, and CD45. In other embodiments, the second immunoglobulin binds CD16 and the fourth immunoglobulin binds an immune cell receptor selected from the group consisting of CD56, NKG2D, and KIRDL1/2/3. In certain embodiments, the fourth immunoglobulin binds to an agent selected from the group consisting of a cytokine, a nucleic acid, a hapten, a small molecule, a radionuclide, an immunotoxin, a vitamin, a peptide, a lipid, a carbohydrate, biotin, digoxin, or any conjugated variants thereof.

[0143] Additionally or alternatively, in some embodiments of the heterodimeric multispecific antibodies disclosed herein, the first immunoglobulin and the third immunoglobulin bind to their respective epitopes with a monovalent affinity or an effective affinity between about 100 nM to about 100 pM. In certain embodiments, the first immunoglobulin and the third immunoglobulin bind to cell surface epitopes that are between 60 and 120 angstroms apart.

[0144] Additionally or alternatively, in some embodiments of the heterodimeric multispecific antibodies disclosed herein, the first immunoglobulin and the third immunoglobulin bind to their respective epitopes with a monovalent affinity or an effective affinity that is less than 100 pM. In certain embodiments, the first immunoglobulin and the third immunoglobulin bind to cell surface epitopes that are up to 180 angstroms apart.

[0145] Additionally or alternatively, in some embodiments of the heterodimeric multispecific antibodies disclosed herein, the first heterodimerization domain of the first immunoglobulin and/or the second heterodimerization domain of the third immunoglobulin is a CH2-CH3 domain and has an isotype selected from the group consisting of IgG1, IgG2, IgG3, IgG4, IgA1, IgA2, IgM, IgD, and IgE. Non-limiting examples of constant region sequences include:

Human IgD constant region, Uniprot: P01880
(SEQ ID NO: 2381)
APTKAPDVFPIISGCRHPKDNSPVVLACLITGYHPTSVTVTWYMGTQSQP
QRTFPEIQRRDSYYMTSSQLSTPLQQWRQGEYKCVVQHTASKSKKEIFRW
PESPKAQASSVPTAQPQAEGSLAKATTAPATTRNTGRGGEEKKKEKEKEE
QEERETKTPECPSHTQPLGVYLLTPAVQDLWLRDKATFTCFVVGSDLKDA
HLTWEVAGKVPTGGVEEGLLERHSNGSQSQHSRLTLPRSLWNAGTSVTCT
LNHPSLPPQRLMALREPAAQAPVKLSLNLLASSDPPEAASWLLCEVSGFS
PPNILLMWLEDQREVNTSGFAPARPPPQPGSTTFWAWSVLRVPAPPSPQP
ATYTCVVSHEDSRTLLNASRSLEVSYVTDHGPMK
Human IgG1 constant region, Uniprot: P01857
(SEQ ID NO: 2382)
[sequence omitted]
Human IgG2 constant region, Uniprot: P01859
(SEQ ID NO: 2383)
ASTKGPSVFPLAPCSRSTSESTAALGCLVKDYFPEPVTVSWNSGALTSGV
HTFPAVLQSSGLYSLSSVVTVPSSNFGTQTYTCNVDHKPSNTKVDKTVER
KCCVECPPCPAPPVAGPSVFLFPPKPKDTLMISRTPEVTCVVVDVSHEDP
EVQFNWYVDGVEVHNAKTKPREEQFNSTFRVVSVLTVVHQDWLNGKEYKC
KVSNKGLPAPIEKTISKTKGQPREPQVYTLPPSREEMTKNQVSLTCLVKG
FYPSDISVEWESNGQPENNYKTTPPMLDSDGSFFLYSKLTVDKSRWQQGN
VFSCSVMHEALHNHYTQKSLSLSPGK
Human IgG3 constant region, Uniprot: P01860
(SEQ ID NO: 2384)
ASTKGPSVFPLAPCSRSTSGGTAALGCLVKDYFPEPVTVSWNSGALTSGV
HTFPAVLQSSGLYSLSSVVTVPSSSLGTQTYTCNVNHKPSNTKVDKRVEL
KTPLGDTTHTCPRCPEPKSCDTPPPCPRCPEPKSCDTPPPCPRCPEPKSC
DTPPPCPRCPAPELLGGPSVFLFPPKPKDTLMISRTPEVTCVVVDVSHED
PEVQFKWYVDGVEVHNAKTKPREEQYNSTFRVVSVLTVLHQDWLNGKEYK
CKVSNKALPAPIEKTISKTKGQPREPQVYTLPPSREEMTKNQVSLTCLVK
GFYPSDIAVEWESSGQPENNYNTTPPMLDSDGSFFLYSKLTVDKSRWQQG
NIFSCSVMHEALHNRFTQKSLSLSPGK
Human IgM constant region, Uniprot: P01871
(SEQ ID NO: 2385)
GSASAPTLFPLVSCENSPSDTSSVAVGCLAQDFLPDSITLSWKYKNNSDI
SSTRGFPSVLRGGKYAATSQVLLPSKDVMQGTDEHVVCKVQHPNGNKEKN
VPLPVIAELPPKVSVFVPPRDGFFGNPRKSKLICQATGFSPRQIQVSWLR
EGKQVGSGVTTDQVQAEAKESGPTTYKVTSTLTIKESDWLGQSMFTCRVD
HRGLTFQQNASSMCVPDQDTAIRVFAIPPSFASIFLTKSTKLTCLVTDLT
TYDSVTISWTRQNGEAVKTHTNISESHPNATFSAVGEASICEDDWNSGER
FTCTVTHTDLPSPLKQTISRPKGVALHRPDVYLLPPAREQLNLRESATIT
CLVTGFSPADVFVQWMQRGQPLSPEKYVTSAPMPEPQAPGRYFAHSILTV
SEEEWNTGETYTCVAHEALPNRVTERTVDKSTGKPTLYNVSLVMSDTAGT
CY
Human IgG4 constant region, Uniprot: P01861
(SEQ ID NO: 2386)
ASTKGPSVFPLAPCSRSTSESTAALGCLVKDYFPEPVTVSWNSGALTSGV
HTFPAVLQSSGLYSLSSVVTVPSSSLGTKTYTCNVDHKPSNTKVDKRVES
KYGPPCPSCPAPEFLGGPSVFLFPPKPKDTLMISRTPEVTCVVVDVSQED
PEVQFNWYVDGVEVHNAKTKPREEQFNSTYRVVSVLTVLHQDWLNGKEYK
CKVSNKGLPSSIEKTISKAKGQPREPQVYTLPPSQEEMTKNQVSLTCLVK
GFYPSDIAVEWESNGQPENNYKTTPPVLDSDGSFFLYSRLTVDKSRWQEG
NVFSCSVMHEALHNHYTQKSLSLSLGK
Human IgA1 constant region, Uniprot: P01876
(SEQ ID NO: 2387)
ASPTSPKVFPLSLCSTQPDGNVVIACLVQGFFPQEPLSVTWSESGQGVTA
RNFPPSQDASGDLYTTSSQLTLPATQCLAGKSVTCHVKHYTNPSQDVTVP
CPVPSTPPTPSPSTPPTPSPSCCHPRLSLHRPALEDLLLGSEANLTCTLT
GLRDASGVTFTWTPSSGKSAVQGPPERDLCGCYSVSSVLPGCAEPWNHGK
TFTCTAAYPESKTPLTATLSKSGNTFRPEVHLLPPPSEELALNELVTLTC
LARGFSPKDVLVRWLQGSQELPREKYLTWASRQEPSQGTTTFAVTSILRV
AAEDWKKGDTFSCMVGHEALPLAFTQKTIDRLAGKPTHVNVSVVMAEVDG
TCY
Human IgA2 constant region, Uniprot: P01877
(SEQ ID NO: 2388)
ASPTSPKVFPLSLDSTPQDGNVVVACLVQGFFPQEPLSVTWSESGQNVTA
RNFPPSQDASGDLYTTSSQLTLPATQCPDGKSVTCHVKHYTNPSQDVTVP
CPVPPPPPCCHPRLSLHRPALEDLLLGSEANLTCTLTGLRDASGATFTWT
PSSGKSAVQGPPERDLCGCYSVSSVLPGCAQPWNHGETFTCTAAHPELKT
PLTANITKSGNTFRPEVHLLPPPSEELALNELVTLTCLARGFSPKDVLVR
WLQGSQELPREKYLTWASRQEPSQGTTTFAVTSILRVAAEDWKKGDTFSC
MVGHEALPLAFTQKTIDRMAGKPTHVNVSVVMAEVDGTCY
Human Ig kappa constant region, Uniprot: P01834
(SEQ ID NO: 2389)
TVAAPSVFIFPPSDEQLKSGTASVVCLLNNFYPREAKVQWKVDNALQSGN
SQESVTEQDSKDSTYSLSSTLTLSKADYEKHKVYACEVTHQGLSSPVTKS
FNRGEC

[0146] In some embodiments, the immunoglobulin-related compositions of the present technology comprise a heavy chain constant region that is at least 80%, at least 85%, at least 90%, at least 95%, at least 99%, or is 100% identical to SEQ ID NOS: 2381-2388. Additionally or alternatively, in some embodiments, the immunoglobulin-related compositions of the present technology comprise a light chain constant region that is at least 80%, at least 85%, at least 90%, at least 95%, at least 99%, or is 100% identical to SEQ ID NO: 2389.

[0147] Additionally or alternatively, in some embodiments of the heterodimeric multispecific antibodies disclosed herein, the first heterodimerization domain of the first immunoglobulin and/or the second heterodimerization domain of the third immunoglobulin is an IgG1 constant region comprising one or more amino acid substitutions selected from the group consisting of N297A and K322A. Additionally or alternatively, in some embodiments of the heterodimeric multispecific antibodies disclosed herein, the first heterodimerization domain of the first immunoglobulin is a CH2-CH3 domain comprising a K409R mutation and the second heterodimerization domain of the third immunoglobulin is a CH2-CH3 domain comprising a F405L mutation.

[0148] Also disclosed herein are recombinant nucleic acid sequences encoding any of the antibodies described herein. In another aspect, the present technology provides a host cell or vector expressing any nucleic acid sequence encoding any immunoglobulin-related composition described herein.

[0149] In some embodiments, the immunoglobulin-related compositions of the present technology are chimeric, humanized, or monoclonal. The immunoglobulin-related compositions of the present technology can further be recombinantly fused to a heterologous polypeptide at the N or C terminus or chemically conjugated (including covalently and non-covalently conjugations) to polypeptides or other compositions. For example, the immunoglobulin-related compositions of the present technology can be recombinantly fused or conjugated to molecules useful as labels in detection assays and effector molecules such as heterologous polypeptides, drugs, or toxins. See, e.g., WO 92/08495; WO 91/14438; WO 89/12624; U.S. Pat. No. 5,314,995; and EP 0 396 387.

[0150] In any of the above embodiments of the immunoglobulin-related compositions of the present technology, the HDTVS antibody may be optionally conjugated to an agent selected from the group consisting of isotopes, dyes, chromagens, contrast agents, drugs, toxins, cytokines, enzymes, enzyme inhibitors, hormones, hormone antagonists, growth factors, radionuclides, metals, liposomes, nanoparticles, RNA, DNA or any combination thereof. For a chemical bond or physical bond, a functional group on the immunoglobulin-related composition typically associates with a functional group on the agent. Alternatively, a functional group on the agent associates with a functional group on the immunoglobulin-related composition.

[0151] The functional groups on the agent and immunoglobulin-related composition can associate directly. For example, a functional group (e.g., a sulfhydryl group) on an agent can associate with a functional group (e.g., sulfhydryl group) on an immunoglobulin-related composition to form a disulfide. Alternatively, the functional groups can associate through a cross-linking agent (i.e., linker). Some examples of cross-linking agents are described below. The cross-linker can be attached to either the agent or the immunoglobulin-related composition. The number of agents or immunoglobulin-related compositions in a conjugate is also limited by the number of functional groups present on the other. For example, the maximum number of agents associated with a conjugate depends on the number of functional groups present on the immunoglobulin-related composition. Alternatively, the maximum number of immunoglobulin-related compositions associated with an agent depends on the number of functional groups present on the agent.

[0152] In yet another embodiment, the conjugate comprises one immunoglobulin-related composition associated to one agent. In one embodiment, a conjugate comprises at least one agent chemically bonded (e.g., conjugated) to at least one immunoglobulin-related composition. The agent can be chemically bonded to an immunoglobulin-related composition by any method known to those in the art. For example, a functional group on the agent may be directly attached to a functional group on the immunoglobulin-related composition. Some examples of suitable functional groups include, for example, amino, carboxyl, sulfhydryl, maleimide, isocyanate, isothiocyanate and hydroxyl.

[0153] The agent may also be chemically bonded to the immunoglobulin-related composition by means of cross-linking agents, such as dialdehydes, carbodiimides, dimaleimides, and the like. Cross-linking agents can, for example, be obtained from Pierce Biotechnology, Inc., Rockford, Ill. The Pierce Biotechnology, Inc. web-site can provide assistance. Additional cross-linking agents include the platinum cross-linking agents described in U.S. Pat. Nos. 5,580,990; 5,985,566; and 6,133,038 of Kreatech Biotechnology, B.V., Amsterdam, The Netherlands.

[0154] Alternatively, the functional group on the agent and immunoglobulin-related composition can be the same. Homobifunctional cross-linkers are typically used to cross-link identical functional groups. Examples of homobifunctional cross-linkers include EGS (i.e., ethylene glycol bis[succinimidylsuccinate]), DSS (i.e., disuccinimidyl suberate), DMA (i.e., dimethyl adipimidate.2HCl), DTSSP (i.e., 3,3′-dithiobis[sulfosuccinimidylpropionate])), DPDPB (i.e., 1,4-di-[3′-(2′-pyridyldithio)-propionamido]butane), and BMH (i.e., bis-maleimidohexane). Such homobifunctional cross-linkers are also available from Pierce Biotechnology, Inc.

[0155] In other instances, it may be beneficial to cleave the agent from the immunoglobulin-related composition. The web-site of Pierce Biotechnology, Inc. described above can also provide assistance to one skilled in the art in choosing suitable cross-linkers which can be cleaved by, for example, enzymes in the cell. Thus the agent can be separated from the immunoglobulin-related composition. Examples of cleavable linkers include SMPT (i.e., 4-succinimidyloxycarbonyl-methyl-a-[2-pyridyldithio]toluene), Sulfo-LC-SPDP (i.e., sulfosuccinimidyl 6-(3-[2-pyridyldithio]-propionamido)hexanoate), LC-SPDP (i.e., succinimidyl 6-(3-[2-pyridyldithio]-propionamido)hexanoate), Sulfo-LC-SPDP (i.e., sulfosuccinimidyl 6-(3-[2-pyridyldithio]-propionamido)hexanoate), SPDP (i.e., N-succinimidyl 3-[2-pyridyldithio]-propionamidohexanoate), and AEDP (i.e., 3-[(2-aminoethyl)dithio]propionic acid HCl).

[0156] In another embodiment, a conjugate comprises at least one agent physically bonded with at least one immunoglobulin-related composition. Any method known to those in the art can be employed to physically bond the agents with the immunoglobulin-related compositions. For example, the immunoglobulin-related compositions and agents can be mixed together by any method known to those in the art. The order of mixing is not important. For instance, agents can be physically mixed with immunoglobulin-related compositions by any method known to those in the art. For example, the immunoglobulin-related compositions and agents can be placed in a container and agitated, by for example, shaking the container, to mix the immunoglobulin-related compositions and agents.

[0157] The immunoglobulin-related compositions can be modified by any method known to those in the art. For instance, the immunoglobulin-related composition may be modified by means of cross-linking agents or functional groups, as described above.

[0158] Heterodimerization. The present technology is dependent on heterodimerization of two IgG-scFv half-molecules through mutations in the heterodimerization domains using techniques known in the art. Any heterodimerization approach where the hinge domain is kept in place may be employed, provided that sufficient antibody stability is achieved.

[0159] Heterodimerization of CH2-CH3 domains. Formation of a heterodimeric trivalent/tetravalent multispecific antibody molecule of the present technology requires the interaction of four different polypeptide chains. Such interactions are difficult to achieve with efficiency within a single cell recombinant production system, due to the many variants of potential chain mispairings. One solution to increase the probability of mispairings, is to engineer “knobs-into-holes” type mutations into the desired polypeptide chain pairs. Such mutations favor heterodimerization over homodimerization. For example, with respect to Fc-Fc-interactions, an amino acid substitution (preferably a substitution with an amino acid comprising a bulky side group forming a ‘knob’, e.g., tryptophan) can be introduced into the CH2 or CH3 domain such that steric interference will prevent interaction with a similarly mutated domain and will obligate the mutated domain to pair with a domain into which a complementary, or accommodating mutation has been engineered, i.e., ‘the hole’ (e.g., a substitution with glycine). Such sets of mutations can be engineered into a pair of polypeptides that are included within the heterodimeric trivalent/tetravalent molecule (e.g., the second polypeptide chain and the third polypeptide chain), and further, engineered into any portion of the polypeptides chains of said pair. Methods of protein engineering to favor heterodimerization over homodimerization are well known in the art, in particular with respect to the engineering of immunoglobulin-like molecules, and are encompassed herein (see e.g., Ridgway et al., 1996, Protein Engr. 9:617-621, Atwell et al., 1997, J. Mol. Biol. 270: 26-35, and Xie et al., 2005, J. Immunol. Methods 296:95-101; each of which is hereby incorporated herein by reference in its entirety).

[0160] The design of variant Fc heterodimers from wildtype homodimers is illustrated by the concept of positive and negative design in the context of protein engineering by balancing stability vs. specificity, where mutations are introduced with the goal of driving heterodimer formation over homodimer formation when the polypeptides are expressed in cell culture conditions. Negative design strategies maximize unfavorable interactions for the formation of homodimers, by either introducing bulky sidechains on one chain and small sidechains on the opposite, for example the knobs-into-holes strategy developed by Genentech (Ridgway J B, Presta L G, Carter P. Protein Eng. 1996 July; 9(7):617-21; Atwell S, Ridgway J B, Wells J A, Carter P. J Mol. Biol. 270(1):26-35 (1997))), or by electrostatic engineering that leads to repulsion of homodimer formation, for example the electrostatic steering strategy developed by Amgen (Gunaskekaran K, et al. JBC 285 (25): 19637-19646 (2010)). In these two examples, negative design asymmetric point mutations are introduced into the wild-type CH3 domain to drive heterodimer formation. Other heterodimerization approaches are described in US 20120149876 (e.g., at Tables 1, 6 and 7), and US 20140294836 (e.g., at FIGS. 15A-B, 16A-B, and 17). Methods for engineering Fc heterodimers using electrostatic steering are described in detail in U.S. Pat. No. 8,592,562.

[0161] In some embodiments of the HDTVS antibodies disclosed herein, the second polypeptide chain and the third polypeptide chain comprise a first CH2-CH3 domain and a second CH2-CH3 domain respectively, wherein the first CH2-CH3 domain and the second CH2-CH3 domain comprise amino acid modifications selected from the group consisting of: T366Y and Y407T respectively; F405A and T394W respectively; Y349C/T366S/L368A/Y407V and S354C/T366W respectively; K409D/K392D and D399K respectively; T366S/L368A/Y407V and T366W respectively; K409D/K392D and D399K/E356K respectively; L351Y/Y407A and T366A/K409F respectively; L351Y/Y407A and T366V/K409F respectively; Y407A and T366A/K409F respectively; D399R/S400R/Y407A and T366A/K409F/K392E/T411E respectively; L351Y/F405A/Y407V and T394W respectively; L351Y/F405A/Y407V and T366L respectively; F405A/Y407V and T366I/K392M/T394W respectively; F405A/Y407V and T366L/K392M/T394W respectively; F405A/Y407V and T366L/T394W respectively; F405A/Y407V and T366I/T394W respectively; and K409R and F405L respectively.

[0162] In some embodiments of the HDTVS antibodies disclosed herein, the second polypeptide chain and the third polypeptide chain comprise a first CH2-CH3 domain and a second CH2-CH3 domain respectively, wherein the first CH2-CH3 domain comprises an amino acid modification at position F405 and amino acid modifications L351Y and Y407V, and the second CH2-CH3 domain comprises amino acid modification T394W. In some embodiments, the amino acid modification at position F405 is F405A, F4051, F405M, F405T, F4055, F405V or F405W.

[0163] In some embodiments of the HDTVS antibodies disclosed herein, the second polypeptide chain and the third polypeptide chain comprise a first CH2-CH3 domain and a second CH2-CH3 domain respectively, wherein the first CH2-CH3 domain comprises amino acid modifications at positions L351 and Y407, and the second CH2-CH3 domain comprises an amino acid modification at position T366 and amino acid modification K409F. In some embodiments, the amino acid modification at position L351 is L351Y, L3511, L351D, L351R or L351F. In some embodiments, the amino acid modification at position Y407 is Y407A, Y407V or Y4075. In certain embodiments, the amino acid modification at position T366 is T366A, T366I, T366L, T366M, T366Y, T366S, T366C, T366V or T366W.

[0164] In some embodiments of the HDTVS antibodies disclosed herein, the second polypeptide chain and the third polypeptide chain comprise a first CH2-CH3 domain and a second CH2-CH3 domain respectively, wherein the first CH2-CH3 domain or the second CH2-CH3 domain comprises an amino acid modification at positions K392, T411, T366, L368 or 5400. The amino acid modification at position K392 may be K392V, K392M, K392R, K392L, K392F or K392E. The amino acid modification at position T411 may be T411N, T411R, T411Q, T411K, T411D, T411E or T411W. The amino acid modification at position 5400 may be S400E, 5400D, 5400R or S400K. The amino acid modification at position T366 may be T366A, T366I, T366L, T366M, T366Y, T366S, T366C, T366V or T366W. The amino acid modification at position L368 may be L368D, L368R, L368T, L368M, L368V, L368F, L368S and L368A.

[0165] In some embodiments of the HDTVS antibodies disclosed herein, the second polypeptide chain and the third polypeptide chain comprise a first CH2-CH3 domain and a second CH2-CH3 domain respectively, wherein the first CH2-CH3 domain comprises amino acid modifications L351Y and Y407A and the second CH2-CH3 domain comprises amino acid modifications T366A and K409F, and optionally wherein the first CH2-CH3 domain or the second CH2-CH3 domain comprises one or more amino acid modifications at position T411, D399, 5400, F405, N390, or K392. The amino acid modification at position T411 may be T411N, T411R, T411Q, T411K, T411D, T411E or T411W. The amino acid modification at position D399 may be D399R, D399W, D399Y or D399K. The amino acid modification at position 5400 may be S400E, 5400D, 5400R, or S400K. The amino acid modification at position F405 may be F4051, F405M, F405T, F4055, F405V or F405W. The amino acid modification at position N390 may be N390R, N390K or N390D. The amino acid modification at position K392 may be K392V, K392M, K392R, K392L, K392F or K392E.

[0166] In some embodiments of the HDTVS antibodies disclosed herein, the second polypeptide chain and the third polypeptide chain comprise a first CH2-CH3 domain and a second CH2-CH3 domain respectively, wherein the first CH2-CH3 domain and the second CH2-CH3 domain comprise a set of amino acid modifications as shown in FIG. 11a. In some embodiments of the HDTVS antibodies disclosed herein, the second polypeptide chain and the third polypeptide chain comprise a first CH2-CH3 domain and a second CH2-CH3 domain respectively, wherein the first CH2-CH3 domain and the second CH2-CH3 domain comprise a set of amino acid modifications as shown in FIG. 11b. In some embodiments of the HDTVS antibodies disclosed herein, the second polypeptide chain and the third polypeptide chain comprise a first CH2-CH3 domain and a second CH2-CH3 domain respectively, wherein the first CH2-CH3 domain and the second CH2-CH3 domain comprise a set of amino acid modifications as shown in FIG. 11c. In some embodiments of the HDTVS antibodies disclosed herein, the second polypeptide chain and the third polypeptide chain comprise a first CH2-CH3 domain and a second CH2-CH3 domain respectively, wherein the first CH2-CH3 domain and the second CH2-CH3 domain comprise a set of amino acid modifications as shown in FIG. 11d. In some embodiments of the HDTVS antibodies disclosed herein, the second polypeptide chain and the third polypeptide chain comprise a first CH2-CH3 domain and a second CH2-CH3 domain respectively, wherein the first CH2-CH3 domain and the second CH2-CH3 domain comprise a set of amino acid modifications as shown in FIG. 11e.

[0167] Other Fc Modifications. In some embodiments, the heterodimeric trivalent/tetravalent multispecific antibodies of the present technology comprise a variant Fc region, wherein said variant Fc region comprises at least one amino acid modification relative to a wild-type Fc region (or the parental Fc region), such that said molecule has an altered affinity for an Fc receptor (e.g., an FcγR), provided that said variant Fc region does not have a substitution at positions that make a direct contact with Fc receptor based on crystallographic and structural analysis of Fc-Fc receptor interactions such as those disclosed by Sondermann et al., Nature, 406:267-273 (2000). Examples of positions within the Fc region that make a direct contact with an Fc receptor such as an FcγR, include amino acids 234-239 (hinge region), amino acids 265-269 (B/C loop), amino acids 297-299 (C7E loop), and amino acids 327-332 (F/G) loop.

[0168] In some embodiments, a heterodimeric trivalent/tetravalent multispecific antibody of the present technology has an altered affinity for activating and/or inhibitory receptors, and includes a variant Fc region with one or more amino acid modifications, wherein said one or more amino acid modification is a N297 substitution with alanine, or a K322 substitution with alanine.

[0169] Glycosylation Modifications. In some embodiments, heterodimeric trivalent/tetravalent multispecific antibodies of the present technology have an Fc region with variant glycosylation as compared to a parent Fc region. In some embodiments, variant glycosylation includes the absence of fucose; in some embodiments, variant glycosylation results from expression in GnT1-deficient CHO cells.

[0170] In some embodiments, the antibodies of the present technology, may have a modified glycosylation site relative to an appropriate reference antibody that binds to an antigen of interest, without altering the functionality of the antibody, e.g., binding activity to the antigen. As used herein, “glycosylation sites” include any specific amino acid sequence in an antibody to which an oligosaccharide (i.e., carbohydrates containing two or more simple sugars linked together) will specifically and covalently attach.

[0171] Oligosaccharide side chains are typically linked to the backbone of an antibody via either N- or O-linkages. N-linked glycosylation refers to the attachment of an oligosaccharide moiety to the side chain of an asparagine residue. O-linked glycosylation refers to the attachment of an oligosaccharide moiety to a hydroxyamino acid, e.g., serine, threonine. For example, an Fc-glycoform that lacks certain oligosaccharides including fucose and terminal N-acetylglucosamine may be produced in special CHO cells and exhibit enhanced ADCC effector function.

[0172] In some embodiments, the carbohydrate content of an immunoglobulin-related composition disclosed herein is modified by adding or deleting a glycosylation site. Methods for modifying the carbohydrate content of antibodies are well known in the art and are included within the present technology, see, e.g., U.S. Pat. No. 6,218,149; EP 0359096B1; U.S. Patent Publication No. US 2002/0028486; International Patent Application Publication WO 03/035835; U.S. Patent Publication No. 2003/0115614; U.S. Pat. Nos. 6,218,149; 6,472,511; all of which are incorporated herein by reference in their entirety. In some embodiments, the carbohydrate content of an antibody (or relevant portion or component thereof) is modified by deleting one or more endogenous carbohydrate moieties of the antibody. In certain embodiments, the present technology includes deleting the glycosylation site of the Fc region of an antibody, by modifying position 297 from asparagine to alanine. Such antibodies lack Fc effector function. In some embodiments, nonspecific FcR-dependent binding in normal tissues is eliminated or reduced (e.g., via N297A mutation in Fc region, which results in aglycosylation).

[0173] Engineered glycoforms may be useful for a variety of purposes, including but not limited to enhancing or reducing effector function. Engineered glycoforms may be generated by any method known to one skilled in the art, for example by using engineered or variant expression strains, by co-expression with one or more enzymes, for example DI N-acetylglucosaminyltransferase III (GnTIII), by expressing a molecule comprising an Fc region in various organisms or cell lines from various organisms, or by modifying carbohydrate(s) after the molecule comprising Fc region has been expressed. Methods for generating engineered glycoforms are known in the art, and include but are not limited to those described in Umana et al., 1999, Nat. Biotechnol. 17: 176-180; Davies et al., 2001, Biotechnol. Bioeng. 74:288-294; Shields et al., 2002, 1 Biol. Chem. 277:26733-26740; Shinkawa et al., 2003, J Biol. Chem. 278:3466-3473; U.S. Pat. No. 6,602,684; U.S. patent application Ser. No. 10/277,370; U.S. patent application Ser. No. 10/113,929; International Patent Application Publications WO 00/61739A1; WO 01/292246A1; WO 02/311140A1; WO 02/30954A1; POTILLEGENT™ technology (Biowa, Inc. Princeton, N.J.); GLYCOMAB™ glycosylation engineering technology (GLYCART biotechnology AG, Zurich, Switzerland); each of which is incorporated herein by reference in its entirety. See, e.g., International Patent Application Publication WO 00/061739; U.S. Patent Application Publication No. 2003/0115614; Okazaki et al., 2004, JMB, 336: 1239-49.

### A. Methods of Preparing Heterodimeric Trivalent/Tetravalent Multispecific Antibodies of the Present Technology

[0174] General Overview. The heterodimeric trivalent/tetravalent multispecific antibodies of the present disclosure can be produced using a variety of methods well known in the art, including de novo protein synthesis and recombinant expression of nucleic acids encoding the binding proteins. Initially, a target antigen is chosen to which an antibody of the present technology can be raised. For example, in some embodiments, an antibody may be raised against a full-length target protein, or to a portion of the target protein. Techniques for generating antibodies directed to such target polypeptides are well known to those skilled in the art. Examples of such techniques include, for example, but are not limited to, those involving display libraries, xeno or human mice, hybridomas, and the like.

[0175] Generally, an antibody is obtained from an originating species. More particularly, the nucleic acid or amino acid sequence of the variable portion of the light chain, heavy chain or both, of an originating species antibody having specificity for a target antigen is obtained. An originating species is any species which was useful to generate the antibody of the present technology or library of antibodies, e.g., rat, mouse, rabbit, chicken, monkey, human, and the like.

[0176] Phage or phagemid display technologies are useful techniques to derive the antibodies of the present technology. Techniques for generating and cloning monoclonal antibodies are well known to those skilled in the art. Expression of sequences encoding antibodies of the present technology, can be carried out in E. coli.

[0177] Due to the degeneracy of nucleic acid coding sequences, other sequences which encode substantially the same amino acid sequences as those of the naturally occurring proteins may be used in the practice of the present technology. These include, but are not limited to, nucleic acid sequences including all or portions of the nucleic acid sequences encoding the above polypeptides, which are altered by the substitution of different codons that encode a functionally equivalent amino acid residue within the sequence, thus producing a silent change. It is appreciated that the nucleotide sequence of an immunoglobulin according to the present technology tolerates sequence homology variations of up to 25% as calculated by standard methods (“Current Methods in Sequence Comparison and Analysis,” Macromolecule Sequencing and Synthesis, Selected Methods and Applications, pp. 127-149, 1998, Alan R. Liss, Inc.) so long as such a variant yields an operative antibody which recognizes a target of interest. For example, one or more amino acid residues within a polypeptide sequence can be substituted by another amino acid of a similar polarity which acts as a functional equivalent, resulting in a silent alteration. Substitutes for an amino acid within the sequence may be selected from other members of the class to which the amino acid belongs. For example, the nonpolar (hydrophobic) amino acids include alanine, leucine, isoleucine, valine, proline, phenylalanine, tryptophan and methionine. The polar neutral amino acids include glycine, serine, threonine, cysteine, tyrosine, asparagine, and glutamine. The positively charged (basic) amino acids include arginine, lysine and histidine. The negatively charged (acidic) amino acids include aspartic acid and glutamic acid. Also included within the scope of the present technology are proteins or fragments or derivatives thereof which are differentially modified during or after translation, e.g., by glycosylation, proteolytic cleavage, linkage to an antibody molecule or other cellular ligands, etc. Additionally, an immunoglobulin encoding nucleic acid sequence can be mutated in vitro or in vivo to create and/or destroy translation, initiation, and/or termination sequences or to create variations in coding regions and/or form new restriction endonuclease sites or destroy pre-existing ones, to facilitate further in vitro modification. Any technique for mutagenesis known in the art can be used, including but not limited to in vitro site directed mutagenesis, J. Biol. Chem. 253:6551, use of Tab linkers (Pharmacia), and the like.

[0178] Monoclonal Antibody. In one embodiment of the present technology, the heterodimeric trivalent/tetravalent multispecific antibody is a monoclonal antibody. For example, in some embodiments, the heterodimeric trivalent/tetravalent multispecific monoclonal antibody may be a human or a mouse heterodimeric trivalent/tetravalent multispecific monoclonal antibody. For preparation of monoclonal antibodies directed towards a target molecule of interest, any technique that provides for the production of antibody molecules by continuous cell line culture can be utilized. Such techniques include, but are not limited to, the hybridoma technique (See, e.g., Kohler & Milstein, 1975. Nature 256: 495-497); the trioma technique; the human B-cell hybridoma technique (See, e.g., Kozbor, et al., 1983. Immunol. Today 4: 72) and the EBV hybridoma technique to produce human monoclonal antibodies (See, e.g., Cole, et al., 1985. In: MONOCLONAL ANTIBODIES AND CANCER THERAPY, Alan R. Liss, Inc., pp. 77-96). Human monoclonal antibodies can be utilized in the practice of the present technology and can be produced by using human hybridomas (See, e.g., Cote, et al., 1983. Proc. Natl. Acad. Sci. USA 80: 2026-2030) or by transforming human B-cells with Epstein Barr Virus in vitro (See, e.g., Cole, et al., 1985. In: MONOCLONAL ANTIBODIES AND CANCER THERAPY, Alan R. Liss, Inc., pp. 77-96). For example, a population of nucleic acids that encode regions of antibodies can be isolated. PCR utilizing primers derived from sequences encoding conserved regions of antibodies is used to amplify sequences encoding portions of antibodies from the population and then DNAs encoding polypeptide chains of the heterodimeric trivalent/tetravalent multispecific antibodies or fragments thereof, such as variable domains, are reconstructed from the amplified sequences. Such amplified sequences also can be fused to DNAs encoding other proteins—e.g., a bacteriophage coat, or a bacterial cell surface protein—for expression and display of the fusion polypeptides on phage or bacteria. Amplified sequences can then be expressed and further selected or isolated based, e.g., on the affinity of the expressed antibody or fragment thereof for an antigen or epitope present on the target molecule of interest. Alternatively, hybridomas expressing heterodimeric trivalent/tetravalent multispecific monoclonal antibodies can be prepared by immunizing a subject and then isolating hybridomas from the subject's spleen using routine methods. See, e.g., Milstein et al., (Galfre and Milstein, Methods Enzymol (1981) 73: 3-46). Screening the hybridomas using standard methods will produce monoclonal antibodies of varying specificity (i.e., for different epitopes) and affinity. A selected monoclonal antibody with the desired properties, e.g., binding to a target antigen, can be used as expressed by the hybridoma, it can be bound to a molecule such as polyethylene glycol (PEG) to alter its properties, or a cDNA encoding it can be isolated, sequenced and manipulated in various ways. Synthetic dendromeric trees can be added to reactive amino acid side chains, e.g., lysine, to enhance the immunogenic properties of a target protein. Also, CPG-dinucleotide techniques can be used to enhance the immunogenic properties of the target protein. Other manipulations include substituting or deleting particular amino acyl residues that contribute to instability of the antibody during storage or after administration to a subject, and affinity maturation techniques to improve affinity of the antibody towards its target antigen.

[0179] Hybridoma Technique. In some embodiments, the antibody of the present technology is a heterodimeric trivalent/tetravalent multispecific monoclonal antibody produced by a hybridoma which includes a B cell obtained from a transgenic non-human animal, e.g., a transgenic mouse, having a genome comprising a human heavy chain transgene and a light chain transgene fused to an immortalized cell. Hybridoma techniques include those known in the art and taught in Harlow et al., Antibodies: A Laboratory Manual Cold Spring Harbor Laboratory, Cold Spring Harbor, N.Y., 349 (1988); Hammerling et al., Monoclonal Antibodies And T-Cell Hybridomas, 563-681 (1981). Other methods for producing hybridomas and monoclonal antibodies are well known to those of skill in the art.

[0180] Phage Display Technique. As noted above, the antibodies of the present technology can be produced through the application of recombinant DNA and phage display technology. For example, heterodimeric trivalent/tetravalent multi specific antibodies, can be prepared using various phage display methods known in the art. In phage display methods, functional antibody domains are displayed on the surface of a phage particle which carries polynucleotide sequences encoding them. Phages with a desired binding property are selected from a repertoire or combinatorial antibody library (e.g., human or murine) by selecting directly with an antigen, typically an antigen bound or captured to a solid surface or bead. Phages used in these methods are typically filamentous phage including fd and M13 with Fab, Fv or disulfide stabilized Fv antibody domains that are recombinantly fused to either the phage gene III or gene VIII protein. In addition, methods can be adapted for the construction of Fab expression libraries (See, e.g., Huse, et al., Science 246: 1275-1281, 1989) to allow rapid and effective identification of monoclonal Fab fragments with the desired specificity for a target antigen, e.g., a target polypeptide or derivatives, fragments, analogs or homologs thereof. Other examples of phage display methods that can be used to make the antibodies of the present technology include those disclosed in Huston et al., Proc. Natl. Acad. Sci U.S.A., 85: 5879-5883, 1988; Chaudhary et al., Proc. Natl. Acad. Sci U.S.A., 87: 1066-1070, 1990; Brinkman et al., J. Immunol. Methods 182: 41-50, 1995; Ames et al., J. Immunol. Methods 184: 177-186, 1995; Kettleborough et al., Eur. J Immunol. 24: 952-958, 1994; Persic et al., Gene 187: 9-18, 1997; Burton et al., Advances in Immunology 57: 191-280, 1994; PCT/GB91/01134; WO 90/02809; WO 91/10737; WO 92/01047; WO 92/18619; WO 93/11236; WO 95/15982; WO 95/20401; WO 96/06213; WO 92/01047 (Medical Research Council et al.); WO 97/08320 (Morphosys); WO 92/01047 (CAT/MRC); WO 91/17271 (Affymax); and U.S. Pat. Nos. 5,698,426, 5,223,409, 5,403,484, 5,580,717, 5,427,908, 5,750,753, 5,821,047, 5,571,698, 5,427,908, 5,516,637, 5,780,225, 5,658,727 and 5,733,743. Methods useful for displaying polypeptides on the surface of bacteriophage particles by attaching the polypeptides via disulfide bonds have been described by Lohning, U.S. Pat. No. 6,753,136. As described in the above references, after phage selection, the antibody coding regions from the phage can be isolated and used to generate whole antibodies, including human antibodies, or any other desired antigen binding fragment, and expressed in any desired host including mammalian cells, insect cells, plant cells, yeast, and bacteria. For example, techniques to recombinantly produce Fab, Fab′ and F(ab′)₂ fragments can also be employed using methods known in the art such as those disclosed in WO 92/22324; Mullinax et al., BioTechniques 12: 864-869, 1992; and Sawai et al., AJRI 34: 26-34, 1995; and Better et al., Science 240: 1041-1043, 1988.

[0181] Generally, hybrid antibodies or hybrid antibody fragments that are cloned into a display vector can be selected against the appropriate antigen in order to identify variants that maintain good binding activity, because the antibody or antibody fragment will be present on the surface of the phage or phagemid particle. See, e.g., Barbas III et al., Phage Display, A Laboratory Manual (Cold Spring Harbor Laboratory Press, Cold Spring Harbor, N.Y., 2001). However, other vector formats could be used for this process, such as cloning the antibody fragment library into a lytic phage vector (modified T7 or Lambda Zap systems) for selection and/or screening.

[0182] Single-Chain Fvs. The heterodimeric trivalent/tetravalent multispecific antibody of the present technology comprises two single-chain Fvs. According to the present technology, techniques can be adapted for the production of single-chain antibodies specific to a target antigen (See, e.g., U.S. Pat. No. 4,946,778). Examples of techniques which can be used to produce single-chain Fvs and antibodies of the present technology include those described in U.S. Pat. Nos. 4,946,778 and 5,258,498; Huston et al., Methods in Enzymology, 203: 46-88, 1991; Shu, L. et al., Proc. Natl. Acad. Sci. USA, 90: 7995-7999, 1993; and Skerra et al., Science 240: 1038-1040, 1988.

[0183] Chimeric and Humanized Antibodies. In one embodiment, the heterodimeric trivalent/tetravalent multispecific antibody of the present technology is chimeric. In one embodiment, the heterodimeric trivalent/tetravalent multispecific antibody of the present technology is humanized. In one embodiment of the present technology, the donor and acceptor antibodies are monoclonal antibodies from different species. For example, the acceptor antibody is a human antibody (to minimize its antigenicity in a human), in which case the resulting CDR-grafted antibody is termed a “humanized” antibody.

[0184] Recombinant heterodimeric trivalent/tetravalent multispecific antibodies, such as chimeric and humanized monoclonal antibodies, comprising both human and non-human portions, can be made using standard recombinant DNA techniques, and are within the scope of the present technology. For some uses, including in vivo use of the heterodimeric trivalent/tetravalent multispecific antibody of the present technology in humans as well as use of these agents in in vitro detection assays, it is possible to use chimeric or humanized heterodimeric trivalent/tetravalent multispecific antibodies. Such chimeric and humanized monoclonal antibodies can be produced by recombinant DNA techniques known in the art. Such useful methods include, e.g., but are not limited to, methods described in International Application No. PCT/US86/02269; U.S. Pat. No. 5,225,539; European Patent No. 184187; European Patent No. 171496; European Patent No. 173494; PCT International Publication No. WO 86/01533; U.S. Pat. Nos. 4,816,567; 5,225,539; European Patent No. 125023; Better, et al., 1988. Science 240: 1041-1043; Liu, et al., 1987. Proc. Natl. Acad. Sci. USA 84: 3439-3443; Liu, et al., 1987. J Immunol. 139: 3521-3526; Sun, et al., 1987. Proc. Natl. Acad. Sci. USA 84: 214-218; Nishimura, et al., 1987. Cancer Res. 47: 999-1005; Wood, et al., 1985. Nature 314: 446-449; Shaw, et al., 1988. J Natl. Cancer Inst. 80: 1553-1559; Morrison (1985) Science 229: 1202-1207; Oi, et al. (1986) BioTechniques 4: 214; Jones, et al., 1986. Nature 321: 552-525; Verhoeyan, et al., 1988. Science 239: 1534; Morrison, Science 229: 1202, 1985; Oi et al., BioTechniques 4: 214, 1986; Gillies et al., J. Immunol. Methods, 125: 191-202, 1989; U.S. Pat. No. 5,807,715; and Beidler, et al., 1988. J. Immunol. 141: 4053-4060. For example, antibodies can be humanized using a variety of techniques including CDR-grafting (EP 0 239 400; WO 91/09967; U.S. Pat. Nos. 5,530,101; 5,585,089; 5,859,205; 6,248,516; EP460167), veneering or resurfacing (EP 0 592 106; EP 0 519 596; Padlan E. A., Molecular Immunology, 28: 489-498, 1991; Studnicka et al., Protein Engineering 7: 805-814, 1994; Roguska et al., PNAS 91: 969-973, 1994), and chain shuffling (U.S. Pat. No. 5,565,332). In one embodiment, a cDNA encoding a murine heterodimeric trivalent/tetravalent multispecific monoclonal antibody is digested with a restriction enzyme selected specifically to remove the sequence encoding the Fc constant region, and the equivalent portion of a cDNA encoding a human Fc constant region is substituted (See Robinson et al., PCT/US86/02269; Akira et al., European Patent Application 184,187; Taniguchi, European Patent Application 171,496; Morrison et al., European Patent Application 173,494; Neuberger et al., WO 86/01533; Cabilly et al. U.S. Pat. No. 4,816,567; Cabilly et al., European Patent Application 125,023; Better et al. (1988) Science 240: 1041-1043; Liu et al. (1987) Proc. Natl. Acad. Sci. USA 84: 3439-3443; Liu et al. (1987) J Immunol 139: 3521-3526; Sun et al. (1987) Proc. Natl. Acad. Sci. USA 84: 214-218; Nishimura et al. (1987) Cancer Res 47: 999-1005; Wood et al. (1985) Nature 314: 446-449; and Shaw et al. (1988) J. Natl. Cancer Inst. 80: 1553-1559; U.S. Pat. Nos. 6,180,370; 6,300,064; 6,696,248; 6,706,484; 6,828,422.

[0185] In one embodiment, the present technology provides the construction of humanized heterodimeric trivalent/tetravalent multispecific antibodies that are unlikely to induce a human anti-mouse antibody (hereinafter referred to as “HAMA”) response, while still having an effective antibody effector function. As used herein, the terms “human” and “humanized”, in relation to antibodies, relate to any antibody which is expected to elicit a therapeutically tolerable weak immunogenic response in a human subject. In one embodiment, the present technology provides for a humanized heterodimeric trivalent/tetravalent multispecific antibody comprising both heavy chain and light chain polypeptides.

[0186] CDR Antibodies. In some embodiments, the heterodimeric trivalent/tetravalent multispecific antibody of the present technology is a CDR antibody. Generally the donor and acceptor antibodies used to generate the heterodimeric trivalent/tetravalent multispecific CDR antibody are monoclonal antibodies from different species; typically the acceptor antibody is a human antibody (to minimize its antigenicity in a human), in which case the resulting CDR-grafted antibody is termed a “humanized” antibody. The graft may be of a single CDR (or even a portion of a single CDR) within a single V_{H} or V_{L} of the acceptor antibody, or can be of multiple CDRs (or portions thereof) within one or both of the V_{H} and V_{L}. Frequently, all three CDRs in all variable domains of the acceptor antibody will be replaced with the corresponding donor CDRs, though one need replace only as many as necessary to permit adequate binding of the resulting CDR-grafted antibody to the target antigen. Methods for generating CDR-grafted and humanized antibodies are taught by Queen et al. U.S. Pat. Nos. 5,585,089; 5,693,761; 5,693,762; and Winter U.S. Pat. No. 5,225,539; and EP 0682040. Methods useful to prepare V_{H} and V_{L} polypeptides are taught by Winter et al., U.S. Pat. Nos. 4,816,397; 6,291,158; 6,291,159; 6,291,161; 6,545,142; EP 0368684; EP0451216; and EP0120694.

[0187] After selecting suitable framework region candidates from the same family and/or the same family member, either or both the heavy and light chain variable regions are produced by grafting the CDRs from the originating species into the hybrid framework regions. Assembly of hybrid antibodies or hybrid antibody fragments having hybrid variable chain regions with regard to either of the above aspects can be accomplished using conventional methods known to those skilled in the art. For example, DNA sequences encoding the hybrid variable domains described herein (i.e., frameworks based on the target species and CDRs from the originating species) can be produced by oligonucleotide synthesis and/or PCR. The nucleic acid encoding CDR regions can also be isolated from the originating species antibodies using suitable restriction enzymes and ligated into the target species framework by ligating with suitable ligation enzymes. Alternatively, the framework regions of the variable chains of the originating species antibody can be changed by site-directed mutagenesis.

[0188] Since the hybrids are constructed from choices among multiple candidates corresponding to each framework region, there exist many combinations of sequences which are amenable to construction in accordance with the principles described herein. Accordingly, libraries of hybrids can be assembled having members with different combinations of individual framework regions. Such libraries can be electronic database collections of sequences or physical collections of hybrids.

[0189] This process typically does not alter the acceptor antibody's FRs flanking the grafted CDRs. However, one skilled in the art can sometimes improve antigen binding affinity of the resulting heterodimeric trivalent/tetravalent multispecific CDR-grafted antibody by replacing certain residues of a given FR to make the FR more similar to the corresponding FR of the donor antibody. Suitable locations of the substitutions include amino acid residues adjacent to the CDR, or which are capable of interacting with a CDR (See, e.g., U.S. Pat. No. 5,585,089, especially columns 12-16). Or one skilled in the art can start with the donor FR and modify it to be more similar to the acceptor FR or a human consensus FR. Techniques for making these modifications are known in the art. Particularly if the resulting FR fits a human consensus FR for that position, or is at least 90% or more identical to such a consensus FR, doing so may not increase the antigenicity of the resulting modified heterodimeric trivalent/tetravalent multispecific CDR-grafted antibody significantly compared to the same antibody with a fully human FR.

[0190] Expression of Recombinant Heterodimeric Trivalent/Tetravalent Multispecific Antibodies. The desired nucleic acid sequences can be produced by recombinant methods (e.g., PCR mutagenesis of an earlier prepared variant of the desired polynucleotide) or by solid-phase DNA synthesis. Because of the degeneracy of the genetic code, a variety of nucleic acid sequences encode each immunoglobulin amino acid sequence, and the present disclosure includes all nucleic acids encoding the binding proteins described herein, which are suitable for use in accordance with the present disclosure.

[0191] Once the nucleotide sequence of the heterodimeric trivalent/tetravalent multispecific antibodies are determined, the nucleotide sequence may be manipulated using methods well known in the art, e.g., recombinant DNA techniques, site directed mutagenesis, PCR, etc. (see, for example, the techniques described in Sambrook et al., 2001, Molecular Cloning, A Laboratory Manual, 3rd Ed., Cold Spring Harbor Laboratory, Cold Spring Harbor, N.Y.; and Ausubel et al., eds., 1998, Current Protocols in Molecular Biology, John Wiley & Sons, NY, which are both incorporated by reference herein in their entireties), to generate, for example, antibodies having a different amino acid sequence, for example by generating amino acid substitutions, deletions, and/or insertions. In one embodiment, human libraries or any other libraries available in the art, can be screened by standard techniques known in the art, to clone the nucleic acids encoding the heterodimeric trivalent/tetravalent multispecific antibodies of the present disclosure.

[0192] As noted above, the antibodies of the present technology can be produced through the application of recombinant DNA technology. Recombinant polynucleotide constructs encoding a heterodimeric trivalent/tetravalent multispecific antibody of the present technology typically include an expression control sequence operably-linked to the coding sequences of heterodimeric trivalent/tetravalent multispecific antibody chains, including naturally-associated or heterologous promoter regions. As such, another aspect of the technology includes vectors containing one or more nucleic acid sequences encoding a heterodimeric trivalent/tetravalent multispecific antibody of the present technology. Methods which are well known to those skilled in the art can be used to construct expression vectors containing the coding sequences for the molecules of the present disclosure and appropriate transcriptional and translational control signals. These methods include, for example, in vitro recombinant DNA techniques, synthetic techniques, and in vivo genetic recombination. See, for example, the techniques described in Sambrook et al., 1990, Molecular Cloning, A Laboratory Manual, 2d Ed., Cold Spring Harbor Laboratory, Cold Spring Harbor, N.Y. and Ausubel et al. eds., 1998, Current Protocols in Molecular Biology, John Wiley & Sons, NY. For recombinant expression of one or more of the polypeptides of the present technology, the nucleic acid containing all or a portion of the nucleotide sequence encoding the heterodimeric trivalent/tetravalent multispecific antibody is inserted into an appropriate cloning vector, or an expression vector (i.e., a vector that contains the necessary elements for the transcription and translation of the inserted polypeptide coding sequence) by recombinant DNA techniques well known in the art and as detailed below. Methods for producing diverse populations of vectors have been described by Lerner et al., U.S. Pat. Nos. 6,291,160 and 6,680,192.

[0193] In general, expression vectors useful in recombinant DNA techniques are often in the form of plasmids. In the present disclosure, “plasmid” and “vector” can be used interchangeably as the plasmid is the most commonly used form of vector. However, the present technology is intended to include such other forms of expression vectors that are not technically plasmids, such as viral vectors (e.g., replication defective retroviruses, adenoviruses and adeno-associated viruses), which serve equivalent functions. Such viral vectors permit infection of a subject and expression of a construct in that subject. In some embodiments, the expression control sequences are eukaryotic promoter systems in vectors capable of transforming or transfecting eukaryotic host cells. Once the vector has been incorporated into the appropriate host, the host is maintained under conditions suitable for high level expression of the nucleotide sequences encoding the heterodimeric trivalent/tetravalent multispecific antibody, and the collection and purification of the heterodimeric trivalent/tetravalent multispecific antibody, e.g., cross-reacting heterodimeric trivalent/tetravalent multispecific antibodies. See generally, U.S. 2002/0199213. These expression vectors are typically replicable in the host organisms either as episomes or as an integral part of the host chromosomal DNA. Commonly, expression vectors contain selection markers, e.g., ampicillin-resistance or hygromycin-resistance, to permit detection of those cells transformed with the desired DNA sequences. Vectors can also encode signal peptide, e.g., pectate lyase, useful to direct the secretion of extracellular antibody fragments. See U.S. Pat. No. 5,576,195.

[0194] The recombinant expression vectors of the present technology comprise a nucleic acid encoding a protein having binding properties to a molecule of interest and in a form suitable for expression of the nucleic acid in a host cell, which means that the recombinant expression vectors include one or more regulatory sequences, selected on the basis of the host cells to be used for expression that is operably-linked to the nucleic acid sequence to be expressed. Within a recombinant expression vector, “operably-linked” is intended to mean that the nucleotide sequence of interest is linked to the regulatory sequence(s) in a manner that allows for expression of the nucleotide sequence (e.g., in an in vitro transcription/translation system or in a host cell when the vector is introduced into the host cell). The term “regulatory sequence” is intended to include promoters, enhancers and other expression control elements (e.g., polyadenylation signals). Such regulatory sequences are described, e.g., in Goeddel, GENE EXPRESSION TECHNOLOGY: METHODS IN ENZYMOLOGY 185, Academic Press, San Diego, Calif. (1990). Regulatory sequences include those that direct constitutive expression of a nucleotide sequence in many types of host cell and those that direct expression of the nucleotide sequence only in certain host cells (e.g., tissue-specific regulatory sequences) or under certain environmental conditions (e.g., inducible regulatory sequences). It will be appreciated by those skilled in the art that the design of the expression vector can depend on such factors as the choice of the host cell to be transformed, the level of expression of polypeptide desired, etc. Typical regulatory sequences useful as promoters of recombinant polypeptide expression (e.g., a heterodimeric trivalent/tetravalent multispecific antibody), include, e.g., but are not limited to, promoters of 3-phosphoglycerate kinase and other glycolytic enzymes. Inducible yeast promoters include, among others, promoters from alcohol dehydrogenase, isocytochrome C, and enzymes responsible for maltose and galactose utilization. In one embodiment, a polynucleotide encoding a heterodimeric trivalent/tetravalent multispecific antibody of the present technology is operably-linked to an ara B promoter and expressible in a host cell. See U.S. Pat. No. 5,028,530. The expression vectors of the present technology can be introduced into host cells to thereby produce polypeptides or peptides, including fusion polypeptides, encoded by nucleic acids as described herein (e.g., heterodimeric trivalent/tetravalent multispecific antibody, etc.).

[0195] Another aspect of the present technology pertains to heterodimeric trivalent/tetravalent multispecific antibody-expressing host cells, which contain a nucleic acid encoding one or more heterodimeric trivalent/tetravalent multispecific antibodies. A variety of host-expression vector systems may be utilized to express the heterodimeric trivalent/tetravalent multispecific antibodies of the present disclosure. Such host-expression systems represent vehicles by which the coding sequences of the heterodimeric trivalent/tetravalent multispecific antibodies of the present disclosure may be produced and subsequently purified, but also represent cells which may, when transformed or transfected with the appropriate nucleotide coding sequences, express the molecules of the present disclosure in situ. These include, but are not limited to, microorganisms such as bacteria (e.g., E. coli and B. subtilis) transformed with recombinant bacteriophage DNA, plasmid DNA or cosmid DNA, expression vectors containing coding sequences for the heterodimeric trivalent/tetravalent multispecific antibodies of the present disclosure; yeast (e.g., Saccharomyces Pichia) transformed with recombinant yeast expression vectors containing sequences encoding the heterodimeric trivalent/tetravalent multispecific antibodies of the present disclosure; insect cell systems infected with recombinant virus expression vectors (e.g., baculovirus) containing the sequences encoding the heterodimeric trivalent/tetravalent multispecific antibodies of the present disclosure; plant cell systems infected with recombinant virus expression vectors (e.g., cauliflower mosaic virus (CaMV) and tobacco mosaic virus (TMV) or transformed with recombinant plasmid expression vectors (e.g., Ti plasmid) containing sequences encoding the heterodimeric trivalent/tetravalent multispecific antibodies of the present disclosure; or mammalian cell systems (e.g., COS, CHO, BHK, 293, 293T, 3T3 cells, lymphotic cells (see U.S. Pat. No. 5,807,715), Per C.6 cells (human retinal cells developed by Crucell) harboring recombinant expression constructs containing promoters derived from the genome of mammalian cells (e.g., metallothionein promoter) or from mammalian viruses (e.g., the adenovirus late promoter; the vaccinia virus 7.5K promoter).

[0196] The recombinant expression vectors of the present technology can be designed for expression of a heterodimeric trivalent/tetravalent multispecific antibody in prokaryotic or eukaryotic cells. For example, a heterodimeric trivalent/tetravalent multispecific antibody can be expressed in bacterial cells such as Escherichia coli, insect cells (using baculovirus expression vectors), fungal cells, e.g., yeast, yeast cells or mammalian cells. Suitable host cells are discussed further in Goeddel, GENE EXPRESSION TECHNOLOGY: METHODS IN ENZYMOLOGY 185, Academic Press, San Diego, Calif. (1990). Alternatively, the recombinant expression vector can be transcribed and translated in vitro, e.g., using T7 promoter regulatory sequences and T7 polymerase. Methods useful for the preparation and screening of polypeptides having a predetermined property, e.g., heterodimeric trivalent/tetravalent multispecific antibody, via expression of stochastically generated polynucleotide sequences have been previously described. See U.S. Pat. Nos. 5,763,192; 5,723,323; 5,814,476; 5,817,483; 5,824,514; 5,976,862; 6,492,107; 6,569,641.

[0197] Expression of polypeptides in prokaryotes is most often carried out in E. coli with vectors containing constitutive or inducible promoters directing the expression of either fusion or non-fusion polypeptides. Fusion vectors add a number of amino acids to a polypeptide encoded therein, usually to the amino terminus of the recombinant polypeptide. Such fusion vectors typically serve three purposes: (i) to increase expression of recombinant polypeptide; (ii) to increase the solubility of the recombinant polypeptide; and (iii) to aid in the purification of the recombinant polypeptide by acting as a ligand in affinity purification. Often, in fusion expression vectors, a proteolytic cleavage site is introduced at the junction of the fusion moiety and the recombinant polypeptide to enable separation of the recombinant polypeptide from the fusion moiety subsequent to purification of the fusion polypeptide. Such enzymes, and their cognate recognition sequences, include Factor Xa, thrombin and enterokinase. Typical fusion expression vectors include pGEX (Pharmacia Biotech Inc; Smith and Johnson, 1988. Gene 67: 31-40), pMAL (New England Biolabs, Beverly, Mass.) and pRIT5 (Pharmacia, Piscataway, N.J.) that fuse glutathione S-transferase (GST), maltose E binding polypeptide, or polypeptide A, respectively, to the target recombinant polypeptide.

[0198] Examples of suitable inducible non-fusion E. coli expression vectors include pTrc (Amrann et al., (1988) Gene 69: 301-315) and pET 11d (Studier et al., GENE EXPRESSION TECHNOLOGY: METHODS IN ENZYMOLOGY 185, Academic Press, San Diego, Calif. (1990) 60-89). Methods for targeted assembly of distinct active peptide or protein domains to yield multifunctional polypeptides via polypeptide fusion have been described by Pack et al., U.S. Pat. Nos. 6,294,353; 6,692,935. One strategy to maximize recombinant polypeptide expression, e.g., a heterodimeric trivalent/tetravalent multispecific antibody, in E. coli is to express the polypeptide in host bacteria with an impaired capacity to proteolytically cleave the recombinant polypeptide. See, e.g., Gottesman, GENE EXPRESSION TECHNOLOGY: METHODS IN ENZYMOLOGY 185, Academic Press, San Diego, Calif. (1990) 119-128. Another strategy is to alter the nucleic acid sequence of the nucleic acid to be inserted into an expression vector so that the individual codons for each amino acid are those preferentially utilized in the expression host, e.g., E. coli (See, e.g., Wada, et al., 1992. Nucl. Acids Res. 20: 2111-2118). Such alteration of nucleic acid sequences of the present technology can be carried out by standard DNA synthesis techniques.

[0199] In another embodiment, the heterodimeric trivalent/tetravalent multispecific antibody expression vector is a yeast expression vector. Examples of vectors for expression in yeast Saccharomyces cerevisiae include pYepSec1 (Baldari, et al., 1987. EMBO J. 6: 229-234), pMFa (Kurjan and Herskowitz, Cell 30: 933-943, 1982), pJRY88 (Schultz et al., Gene 54: 113-123, 1987), pYES2 (Invitrogen Corporation, San Diego, Calif.), and picZ (Invitrogen Corp, San Diego, Calif.). Alternatively, a heterodimeric trivalent/tetravalent multispecific antibody can be expressed in insect cells using baculovirus expression vectors. Baculovirus vectors available for expression of polypeptides, e.g., heterodimeric trivalent/tetravalent multispecific antibody, in cultured insect cells (e.g., SF9 cells) include the pAc series (Smith, et al., Mol. Cell. Biol. 3: 2156-2165, 1983) and the pVL series (Lucklow and Summers, 1989. Virology 170: 31-39).

[0200] In yet another embodiment, a nucleic acid encoding a heterodimeric trivalent/tetravalent multispecific antibody of the present technology is expressed in mammalian cells using a mammalian expression vector. Examples of mammalian expression vectors include, e.g., but are not limited to, pCDM8 (Seed, Nature 329: 840, 1987) and pMT2PC (Kaufman, et al., EMBO J. 6: 187-195, 1987). When used in mammalian cells, the expression vector's control functions are often provided by viral regulatory elements. For example, commonly used promoters are derived from polyoma, adenovirus 2, cytomegalovirus, and simian virus 40. For other suitable expression systems for both prokaryotic and eukaryotic cells that are useful for expression of the heterodimeric trivalent/tetravalent multispecific antibody of the present technology, see, e.g., Chapters 16 and 17 of Sambrook, et al., MOLECULAR CLONING: A LABORATORY MANUAL. 2nd ed., Cold Spring Harbor Laboratory, Cold Spring Harbor Laboratory Press, Cold Spring Harbor, N.Y., 1989.

[0201] In another embodiment, the recombinant mammalian expression vector is capable of directing expression of the nucleic acid in a particular cell type (e.g., tissue-specific regulatory elements). Tissue-specific regulatory elements are known in the art. Non-limiting examples of suitable tissue-specific promoters include the albumin promoter (liver-specific; Pinkert, et al., Genes Dev. 1: 268-277, 1987), lymphoid-specific promoters (Calame and Eaton, Adv. Immunol. 43: 235-275, 1988), promoters of T cell receptors (Winoto and Baltimore, EMBO J. 8: 729-733, 1989) and immunoglobulins (Banerji, et al., 1983. Cell 33: 729-740; Queen and Baltimore, Cell 33: 741-748, 1983.), neuron-specific promoters (e.g., the neurofilament promoter; Byrne and Ruddle, Proc. Natl. Acad. Sci. USA 86: 5473-5477, 1989), pancreas-specific promoters (Edlund, et al., 1985. Science 230: 912-916), and mammary gland-specific promoters (e.g., milk whey promoter; U.S. Pat. No. 4,873,316 and European Application Publication No. 264,166). Developmentally-regulated promoters are also encompassed, e.g., the murine hox promoters (Kessel and Gruss, Science 249: 374-379, 1990) and the α-fetoprotein promoter (Campes and Tilghman, Genes Dev. 3: 537-546, 1989).

[0202] Another aspect of the present methods pertains to host cells into which a recombinant expression vector of the present technology has been introduced. The terms “host cell” and “recombinant host cell” are used interchangeably herein. It is understood that such terms refer not only to the particular subject cell but also to the progeny or potential progeny of such a cell. Because certain modifications may occur in succeeding generations due to either mutation or environmental influences, such progeny may not, in fact, be identical to the parent cell, but are still included within the scope of the term as used herein.

[0203] A host cell can be any prokaryotic or eukaryotic cell. For example, a heterodimeric trivalent/tetravalent multispecific antibody can be expressed in bacterial cells such as E. coli, insect cells, yeast or mammalian cells. Mammalian cells are a suitable host for expressing nucleotide segments encoding immunoglobulins or fragments thereof. See Winnacker, From Genes To Clones, (VCH Publishers, N Y, 1987). A number of suitable host cell lines capable of secreting intact heterologous proteins have been developed in the art, and include Chinese hamster ovary (CHO) cell lines, various COS cell lines, HeLa cells, L cells and myeloma cell lines. In some embodiments, the cells are non-human. For example, mammalian cells such as Chinese hamster ovary cells (CHO), in conjunction with a vector such as the major intermediate early gene promoter element from human cytomegalovirus can be an effective expression system for immunoglobulins (Foecking et al., 1998, Gene 45:101; Cockett et al., 1990, BioTechnology 8:2).

[0204] Expression vectors for these cells can include expression control sequences, such as an origin of replication, a promoter, an enhancer, and necessary processing information sites, such as ribosome binding sites, RNA splice sites, polyadenylation sites, and transcriptional terminator sequences. Queen et al., Immunol. Rev. 89: 49, 1986. Illustrative expression control sequences are promoters derived from endogenous genes, cytomegalovirus, SV40, adenovirus, bovine papillomavirus, and the like. Co et al., J Immunol. 148: 1149, 1992. Other suitable host cells are known to those skilled in the art.

[0205] Vector DNA can be introduced into prokaryotic or eukaryotic cells via conventional transformation or transfection techniques. As used herein, the terms “transformation” and “transfection” are intended to refer to a variety of art-recognized techniques for introducing foreign nucleic acid (e.g., DNA) into a host cell, including calcium phosphate or calcium chloride co-precipitation, DEAE-dextran-mediated transfection, lipofection, electroporation, biolistics or viral-based transfection. Other methods used to transform mammalian cells include the use of polybrene, protoplast fusion, liposomes, electroporation, and microinjection (See generally, Sambrook et al., Molecular Cloning). Suitable methods for transforming or transfecting host cells can be found in Sambrook, et al. (MOLECULAR CLONING: A LABORATORY MANUAL. 2nd ed., Cold Spring Harbor Laboratory, Cold Spring Harbor Laboratory Press, Cold Spring Harbor, N.Y., 1989), and other laboratory manuals. The vectors containing the DNA segments of interest can be transferred into the host cell by well-known methods, depending on the type of cellular host.

[0206] For stable transfection of mammalian cells, it is known that, depending upon the expression vector and transfection technique used, only a small fraction of cells may integrate the foreign DNA into their genome. In order to identify and select these integrants, a gene that encodes a selectable marker (e.g., resistance to antibiotics) is generally introduced into the host cells along with the gene of interest. Various selectable markers include those that confer resistance to drugs, such as G418, hygromycin and methotrexate. Nucleic acid encoding a selectable marker can be introduced into a host cell on the same vector as that encoding the heterodimeric trivalent/tetravalent multispecific antibody or can be introduced on a separate vector. Cells stably transfected with the introduced nucleic acid can be identified by drug selection (e.g., cells that have incorporated the selectable marker gene will survive, while the other cells die).

[0207] A host cell that includes a heterodimeric trivalent/tetravalent multispecific antibody of the present technology, such as a prokaryotic or eukaryotic host cell in culture, can be used to produce (i.e., express) a recombinant heterodimeric trivalent/tetravalent multispecific antibody. In one embodiment, the method comprises culturing the host cell (into which a recombinant expression vector encoding the heterodimeric trivalent/tetravalent multispecific antibody has been introduced) in a suitable medium such that the heterodimeric trivalent/tetravalent multispecific antibody is produced. In another embodiment, the method further comprises the step of isolating the heterodimeric trivalent/tetravalent multispecific antibody from the medium or the host cell. Once expressed, collections of the heterodimeric trivalent/tetravalent multispecific antibody, e.g., the heterodimeric trivalent/tetravalent multispecific antibodies or the heterodimeric trivalent/tetravalent multispecific antibody-related polypeptides are purified from culture media and host cells. The heterodimeric trivalent/tetravalent multispecific antibody can be purified according to standard procedures of the art, including HPLC purification, column chromatography, gel electrophoresis and the like. In one embodiment, the heterodimeric trivalent/tetravalent multispecific antibody is produced in a host organism by the method of Boss et al., U.S. Pat. No. 4,816,397. Usually, heterodimeric trivalent/tetravalent multispecific antibody chains are expressed with signal sequences and are thus released to the culture media. However, if the heterodimeric trivalent/tetravalent multispecific antibody chains are not naturally secreted by host cells, the heterodimeric trivalent/tetravalent multispecific antibody chains can be released by treatment with mild detergent. Purification of recombinant polypeptides is well known in the art and includes ammonium sulfate precipitation, affinity chromatography purification technique, column chromatography, ion exchange purification technique, gel electrophoresis and the like (See generally Scopes, Protein Purification (Springer-Verlag, N.Y., 1982).

[0208] Polynucleotides encoding heterodimeric trivalent/tetravalent multispecific antibodies, e.g., the heterodimeric trivalent/tetravalent multispecific antibody coding sequences, can be incorporated in transgenes for introduction into the genome of a transgenic animal and subsequent expression in the milk of the transgenic animal. See, e.g., U.S. Pat. Nos. 5,741,957, 5,304,489, and 5,849,992. Suitable transgenes include coding sequences for light and/or heavy chains in operable linkage with a promoter and enhancer from a mammary gland specific gene, such as casein or β-lactoglobulin. For production of transgenic animals, transgenes can be microinjected into fertilized oocytes, or can be incorporated into the genome of embryonic stem cells, and the nuclei of such cells transferred into enucleated oocytes.

[0209] In bacterial systems, a number of expression vectors may be advantageously selected depending upon the use intended for the molecule being expressed. For example, when a large quantity of such a protein is to be produced, for the generation of pharmaceutical compositions of an antibody, vectors which direct the expression of high levels of fusion protein products that are readily purified may be desirable. Such vectors include, but are not limited, to the E. coli expression vector pUR278 (Ruther et al., 1983, EMBO J. 2:1791), in which the antibody coding sequence may be ligated individually into the vector in frame with the lac Z coding region so that a fusion protein is produced; pIN vectors (Inouye & Inouye, 1985, Nucleic Acids Res. 13:3101-3109; Van Heeke & Schuster, 1989, J. Biol. Chem. 24:5503-5509); and the like. pGEX vectors may also be used to express foreign polypeptides as fusion proteins with glutathione S-transferase (GST). In general, such fusion proteins are soluble and can easily be purified from lysed cells by adsorption and binding to a matrix glutathione-agarose beads followed by elution in the presence of free glutathione. The pGEX vectors are designed to include thrombin or factor Xa protease cleavage sites so that the cloned target gene product can be released from the GST moiety.

[0210] In an insect system, Autographa californica nuclear polyhedrosis virus (AcNPV) is used as a vector to express foreign genes. The virus grows in Spodoptera frugiperda cells. The antibody coding sequence may be cloned individually into non-essential regions (e.g., the polyhedrin gene) of the virus and placed under control of an AcNPV promoter (e.g., the polyhedrin promoter).

[0211] In mammalian host cells, a number of viral-based expression systems may be utilized. In cases where an adenovirus is used as an expression vector, the antibody coding sequence of interest may be ligated to an adenovirus transcription/translation control complex, e.g., the late promoter and tripartite leader sequence. This chimeric gene may then be inserted in the adenovirus genome by in vitro or in vivo recombination. Insertion in a non-essential region of the viral genome (e.g., region E1 or E3) will result in a recombinant virus that is viable and capable of expressing the immunoglobulin molecule in infected hosts (e.g., see Logan & Shenk, 1984, Proc. Natl. Acad. Sci. USA 81:355-359). Specific initiation signals may also be required for efficient translation of inserted antibody coding sequences. These signals include the ATG initiation codon and adjacent sequences. Furthermore, the initiation codon must be in phase with the reading frame of the desired coding sequence to ensure translation of the entire insert. These exogenous translational control signals and initiation codons can be of a variety of origins, both natural and synthetic. The efficiency of expression may be enhanced by the inclusion of appropriate transcription enhancer elements, transcription terminators, etc. (see Bittner et al., 1987, Methods in Enzymol. 153:51-544).

[0212] In addition, a host cell strain may be chosen which modulates the expression of the inserted sequences, or modifies and processes the gene product in the specific fashion desired. Such modifications (e.g., glycosylation) and processing (e.g., cleavage) of protein products may be important for the function of the protein. For example, in certain embodiments, the polypeptides of a heterodimeric trivalent/tetravalent multispecific antibody of the present disclosure may be expressed as a single gene product (e.g., as a single polypeptide chain, i.e., as a polyprotein precursor), requiring proteolytic cleavage by native or recombinant cellular mechanisms to form the separate polypeptides of the heterodimeric trivalent/tetravalent multispecific antibodies of the present disclosure. The present disclosure thus encompasses engineering a nucleic acid sequence to encode a polyprotein precursor molecule comprising the polypeptides of the heterodimeric trivalent/tetravalent multispecific antibodies of the present disclosure, which includes coding sequences capable of directing post translational cleavage of said polyprotein precursor. Post-translational cleavage of the polyprotein precursor results in the polypeptides of the heterodimeric trivalent/tetravalent multispecific antibodies of the present disclosure.

[0213] The post translational cleavage of the precursor molecule comprising the polypeptides of a heterodimeric trivalent/tetravalent multispecific antibody of the present disclosure may occur in vivo (i.e., within the host cell by native or recombinant cell systems/mechanisms, e.g. furin cleavage at an appropriate site) or may occur in vitro (e.g., incubation of said polypeptide chain in a composition comprising proteases or peptidases of known activity and/or in a composition comprising conditions or reagents known to foster the desired proteolytic action). Purification and modification of recombinant proteins are well known in the art such that the design of the polyprotein precursor could include a number of embodiments readily appreciated by a skilled artisan. Any known proteases or peptidases known in the art can be used for the described modification of the precursor molecule, e.g., thrombin (which recognizes the amino acid sequence LVPR\hat{ }GS (SEQ ID NO: 2500)), or factor Xa (which recognizes the amino acid sequence I(E/D)GR\hat{ } (SEQ ID NO: 2501) (Nagani et al., 1985, PNAS USA 82:7252-7255, and reviewed in Jenny et al., 2003, Protein Expr. Purif. 31:1-11, each of which is incorporated by reference herein in its entirety)), enterokinase (which recognizes the amino acid sequence DDDDK\hat{ } (SEQ ID NO: 2502) (Collins-Racie et al., 1995, Biotechnol. 13:982-987 hereby incorporated by reference herein in its entirety)), furin (which recognizes the amino acid sequence RXXR\hat{ }, with a preference for RX(K/R)R\hat{ } (SEQ ID NO: 2503 and SEQ ID NO: 2504, respectively) (additional R at P6 position appears to enhance cleavage)), and AcTEV (which recognizes the amino acid sequence ENLYFQ\hat{ }G (SEQ ID NO: 2505) (Parks et al., 1994, Anal. Biochem. 216:413 hereby incorporated by reference herein in its entirety)) and the Foot and Mouth Disease Virus Protease C3.

[0214] Different host cells have characteristic and specific mechanisms for the post-translational processing and modification of proteins and gene products. Appropriate cell lines or host systems can be chosen to ensure the correct modification and processing of the foreign protein expressed. To this end, eukaryotic host cells which possess the cellular machinery for proper processing of the primary transcript, glycosylation, and phosphorylation of the gene product may be used. Such mammalian host cells include but are not limited to CHO, VERY, BHK, Hela, COS, MDCK, 293, 293T, 3T3, WI38, BT483, Hs578T, HTB2, BT20 and T47D, CRL7030 and Hs578Bst.

[0215] For long-term, high-yield production of recombinant proteins, stable expression is desirable. For example, cell lines which stably express an antibody of the present disclosure may be engineered. Rather than using expression vectors which contain viral origins of replication, host cells can be transformed with DNA controlled by appropriate expression control elements (e.g., promoter, enhancer, sequences, transcription terminators, polyadenylation sites, etc.), and a selectable marker. Following the introduction of the foreign DNA, engineered cells may be allowed to grow for 1-2 days in an enriched media, and then are switched to a selective media. The selectable marker in the recombinant plasmid confers resistance to the selection and allows cells to stably integrate the plasmid into their chromosomes and grow to form foci which in turn can be cloned and expanded into cell lines. This method may advantageously be used to engineer cell lines which express the antibodies of the present disclosure. Such engineered cell lines may be particularly useful in screening and evaluation of compounds that interact directly or indirectly with the heterodimeric trivalent/tetravalent multi specific antibodies of the present disclosure.

[0216] A number of selection systems may be used, including but not limited to the herpes simplex virus thymidine kinase (Wigler et al., 1977, Cell 11: 223), hypoxanthine-guanine phosphoribosyltransferase (Szybalska & Szybalski, 1992, Proc. Natl. Acad. Sci. USA 48: 202), and adenine phosphoribosyltransferase (Lowy et al., 1980, Cell 22: 817) genes can be employed in tk-, hgprt- or aprt-cells, respectively. Also, antimetabolite resistance can be used as the basis of selection for the following genes: dhfr, which confers resistance to methotrexate (Wigler et al., 1980, Proc. Natl. Acad. Sci. USA 77:357; O'Hare et al., 1981, Proc. Natl. Acad. Sci. USA 78: 1527); gpt, which confers resistance to mycophenolic acid (Mulligan & Berg, 1981, Proc. Natl. Acad. Sci. USA 78: 2072); neo, which confers resistance to the aminoglycoside G-418 Clinical Pharmacy 12: 488-505; Wu and Wu, 1991, 3:87-95; Tolstoshev, 1993, Ann. Rev. Pharmacol. Toxicol. 32:573-596; Mulligan, 1993, Science 260:926-932; and Morgan and Anderson, 1993, Ann. Rev. Biochem. 62:191-217; May, 1993, TIB TECH 11(5):155-215). Methods commonly known in the art of recombinant DNA technology which can be used are described in Ausubel et al. (eds.), 1993, Current Protocols in Molecular Biology, John Wiley & Sons, NY; Kriegler, 1990, Gene Transfer and Expression, A Laboratory Manual, Stockton Press, NY; and in Chapters 12 and 13, Dracopoli et al. (eds), 1994, Current Protocols in Human Genetics, John Wiley & Sons, NY.; Colberre-Garapin et al., 1981, J. Mol. Biol. 150:1; and hygro, which confers resistance to hygromycin (Santerre et al., 1984, Gene 30:147).

[0217] The expression levels of a heterodimeric trivalent/tetravalent multispecific antibody of the present disclosure can be increased by vector amplification (for a review, see Bebbington and Hentschel, The use of vectors based on gene amplification for the expression of cloned genes in mammalian cells in DNA cloning, Vol. 3 (Academic Press, New York, 1987). When a marker in the vector system expressing an antibody is amplifiable, increase in the level of inhibitor present in culture of host cell will increase the number of copies of the selection marker gene. Since the amplified region is associated with the nucleotide sequence of a polypeptide of the heterodimeric trivalent/tetravalent multispecific antibody molecule, production of the polypeptide will also increase (Crouse et al., 1983, Mol. Cell. Biol. 3:257).

[0218] The host cell may be co-transfected with a plurality of expression vectors of the present disclosure, wherein each expression vector encodes at least one and no more than three of the first, second, third, or fourth polypeptide chains of the heterodimeric trivalent/tetravalent multispecific antibody. Alternatively, a single vector may be used which encodes the first, second, third, and fourth polypeptide chains of the heterodimeric trivalent/tetravalent multispecific antibody. The coding sequences for the polypeptides of the heterodimeric trivalent/tetravalent multispecific antibodies of the present disclosure may comprise cDNA or genomic DNA.

[0219] Once a molecule of the present disclosure (i.e., heterodimeric trivalent/tetravalent multispecific antibodies) has been recombinantly expressed, it may be purified by any method known in the art for purification of polypeptides, polyproteins or heterodimeric trivalent/tetravalent multispecific antibodies (e.g., analogous to antibody purification schemes based on antigen selectivity) for example, by chromatography (e.g., ion exchange, affinity, particularly by affinity for the specific antigen (optionally after Protein A selection where the heterodimeric trivalent/tetravalent multispecific antibodies molecule comprises an Fc domain (or portion thereof)), and sizing column chromatography), centrifugation, differential solubility, or by any other standard technique for the purification of polypeptides, polyproteins or heterodimeric trivalent/tetravalent multispecific antibodies.

[0220] Labeled Heterodimeric trivalent/tetravalent multispecific antibodies. In one embodiment, the heterodimeric trivalent/tetravalent multispecific antibody of the present technology is coupled with a label moiety, i.e., detectable group. The particular label or detectable group conjugated to the heterodimeric trivalent/tetravalent multispecific antibody is not a critical aspect of the technology, so long as it does not significantly interfere with the specific binding of the heterodimeric trivalent/tetravalent multispecific antibody of the present technology to its target antigens. The detectable group can be any material having a detectable physical or chemical property. Such detectable labels have been well-developed in the field of immunoassays and imaging. In general, almost any label useful in such methods can be applied to the present technology. Thus, a label is any composition detectable by spectroscopic, photochemical, biochemical, immunochemical, electrical, optical or chemical means. Labels useful in the practice of the present technology include magnetic beads (e.g., Dynabeads™), fluorescent dyes (e.g., fluorescein isothiocyanate, Texas red, rhodamine, and the like), radiolabels (e.g., ³H, ¹⁴C, ³⁵S ¹²⁵I, ¹²¹I, ¹³¹I, ¹¹²In, ⁹⁹mTc), other imaging agents such as microbubbles (for ultrasound imaging), ¹⁸F, 1^{1C}, ¹⁵O, (for Positron emission tomography), ^{99m}Tc, ¹¹¹In (for Single photon emission tomography), enzymes (e.g., horse radish peroxidase, alkaline phosphatase and others commonly used in an ELISA), and calorimetric labels such as colloidal gold or colored glass or plastic (e.g., polystyrene, polypropylene, latex, and the like) beads. Patents that describe the use of such labels include U.S. Pat. Nos. 3,817,837; 3,850,752; 3,939,350; 3,996,345; 4,277,437; 4,275,149; and 4,366,241, each incorporated herein by reference in their entirety and for all purposes. See also Handbook of Fluorescent Probes and Research Chemicals (6^{th} Ed., Molecular Probes, Inc., Eugene Oreg.).

[0221] The label can be coupled directly or indirectly to the desired component of an assay according to methods well known in the art. As indicated above, a wide variety of labels can be used, with the choice of label depending on factors such as required sensitivity, ease of conjugation with the compound, stability requirements, available instrumentation, and disposal provisions.

[0222] Non-radioactive labels are often attached by indirect means. Generally, a ligand molecule (e.g., biotin) is covalently bound to the molecule. The ligand then binds to an anti-ligand (e.g., streptavidin) molecule which is either inherently detectable or covalently bound to a signal system, such as a detectable enzyme, a fluorescent compound, or a chemiluminescent compound. A number of ligands and anti-ligands can be used. Where a ligand has a natural anti-ligand, e.g., biotin, thyroxine, and cortisol, it can be used in conjunction with the labeled, naturally-occurring anti-ligands. Alternatively, any haptenic or antigenic compound can be used in combination with an antibody, e.g., a heterodimeric trivalent/tetravalent multispecific antibody.

[0223] The molecules can also be conjugated directly to signal generating compounds, e.g., by conjugation with an enzyme or fluorophore. Enzymes of interest as labels will primarily be hydrolases, particularly phosphatases, esterases and glycosidases, or oxidoreductases, particularly peroxidases. Fluorescent compounds useful as labeling moieties, include, but are not limited to, e.g., fluorescein and its derivatives, rhodamine and its derivatives, dansyl, umbelliferone, and the like. Chemiluminescent compounds useful as labeling moieties, include, but are not limited to, e.g., luciferin, and 2,3-dihydrophthalazinediones, e.g., luminol. For a review of various labeling or signal-producing systems which can be used, see U.S. Pat. No. 4,391,904.

[0224] Means of detecting labels are well known to those of skill in the art. Thus, for example, where the label is a radioactive label, means for detection include a scintillation counter or photographic film as in autoradiography. Where the label is a fluorescent label, it can be detected by exciting the fluorochrome with the appropriate wavelength of light and detecting the resulting fluorescence. The fluorescence can be detected visually, by means of photographic film, by the use of electronic detectors such as charge coupled devices (CCDs) or photomultipliers and the like. Similarly, enzymatic labels can be detected by providing the appropriate substrates for the enzyme and detecting the resulting reaction product. Finally simple colorimetric labels can be detected simply by observing the color associated with the label. Thus, in various dipstick assays, conjugated gold often appears pink, while various conjugated beads appear the color of the bead.

[0225] Some assay formats do not require the use of labeled components. For instance, agglutination assays can be used to detect the presence of the target antibodies, e.g., the heterodimeric trivalent/tetravalent multispecific antibodies. In this case, antigen-coated particles are agglutinated by samples comprising the target antibodies. In this format, none of the components need be labeled and the presence of the target antibody is detected by simple visual inspection.

[0226] Fusion Proteins. In one embodiment, the heterodimeric trivalent/tetravalent multispecific antibody of the present technology is a fusion protein. In some embodiments, the heterodimeric trivalent/tetravalent multispecific antibodies of the present technology, when fused to a second protein, can be used as an antigenic tag. Examples of domains that can be fused to polypeptides include not only heterologous signal sequences, but also other heterologous functional regions. The fusion does not necessarily need to be direct, but can occur through linker sequences. Moreover, fusion proteins of the present technology can also be engineered to improve characteristics of the heterodimeric trivalent/tetravalent multispecific antibodies. For instance, a region of additional amino acids, particularly charged amino acids, can be added to the N-terminus of the heterodimeric trivalent/tetravalent multispecific antibody to improve stability and persistence during purification from the host cell or subsequent handling and storage. Also, peptide moieties can be added to a heterodimeric trivalent/tetravalent multispecific antibody to facilitate purification. Such regions can be removed prior to final preparation of the heterodimeric trivalent/tetravalent multispecific antibody. The addition of peptide moieties to facilitate handling of polypeptides may be accomplished using familiar and routine techniques in the art. The heterodimeric trivalent/tetravalent multispecific antibody of the present technology can be fused to marker sequences, such as a peptide which facilitates purification of the fused polypeptide. In select embodiments, the marker amino acid sequence is a hexa-histidine peptide (SEQ ID NO: 2510), such as the tag provided in a pQE vector (QIAGEN, Inc., Chatsworth, Calif.), among others, many of which are commercially available. As described in Gentz et al., Proc. Natl. Acad. Sci. USA 86: 821-824, 1989, for instance, hexa-histidine (SEQ ID NO: 2510) provides for convenient purification of the fusion protein. Another peptide tag useful for purification, the “HA” tag, corresponds to an epitope derived from the influenza hemagglutinin protein. Wilson et al., Cell 37: 767, 1984.

[0227] Thus, any of these above fusion proteins can be engineered using the polynucleotides or the polypeptides of the present technology. Also, in some embodiments, the fusion proteins described herein show an increased half-life in vivo.

[0228] Fusion proteins having disulfide-linked dimeric structures (due to the IgG) can be more efficient in binding and neutralizing other molecules compared to the monomeric secreted protein or protein fragment alone. Fountoulakis et al., J. Biochem. 270: 3958-3964, 1995.

[0229] Similarly, EP-A-O 464 533 (Canadian counterpart 2045869) discloses fusion proteins comprising various portions of constant region of immunoglobulin molecules together with another human protein or a fragment thereof. In many cases, the Fc part in a fusion protein is beneficial in therapy and diagnosis, and thus can result in, e.g., improved pharmacokinetic properties. See EP-A 0232 262. Alternatively, deleting or modifying the Fc part after the fusion protein has been expressed, detected, and purified, may be desired. For example, the Fc portion can hinder therapy and diagnosis if the fusion protein is used as an antigen for immunizations. In drug discovery, e.g., human proteins, such as hIL-5, have been fused with Fc portions for the purpose of high-throughput screening assays to identify antagonists of hIL-5. Bennett et al., J. Molecular Recognition 8: 52-58, 1995; Johanson et al., J. Biol. Chem., 270: 9459-9471, 1995.

[0230] In some embodiments, the heterodimeric trivalent/tetravalent multispecific antibody of the present technology may be conjugated to a therapeutic agent or a payload. Examples of a payload include a toxin, a protein such as tumor necrosis factor, interferons including, but not limited to, α-interferon (IFN-α), β-interferon (IFN-β), nerve growth factor (NGF), platelet derived growth factor (PDGF), tissue plasminogen activator (TPA), an apoptotic agent (e.g., TNF-α, TNF-β, AIM I as disclosed in PCT Publication No. WO 97/33899), AIM II (see, PCT Publication No. WO 97/34911), Fas ligand (Takahashi et al., J. Immunol., 6:1567-1574, 1994), and VEGI (PCT Publication No. WO 99/23105), a thrombotic agent or an anti-angiogenic agent (e.g., angiostatin or endostatin), or a biological response modifier such as, for example, a lymphokine (e.g., interleukin-1 (“IL-1”), interleukin-2 (“IL-2”), interleukin-6 (“IL-6”), granulocyte macrophage colony stimulating factor (“GM-CSF”), and granulocyte colony stimulating factor (“G-CSF”), macrophage colony stimulating factor, (“M-CSF”), or a growth factor (e.g., growth hormone (“GH”); proteases, or ribonucleases. Examples of therapeutic agents include paclitaxol, cytochalasin B, gramicidin D, ethidium bromide, emetine, mitomycin, etoposide, tenoposide, vincristine, vinblastine, colchicin, doxorubicin, daunorubicin, dihydroxy anthracin dione, mitoxantrone, mithramycin, actinomycin D, 1-dehydrotestosterone, glucocorticoids, procaine, tetracaine, lidocaine, propranolol, and puromycin and analogs or homologs thereof. Other examples of therapeutic agents include, but are not limited to, antimetabolites (e.g., methotrexate, 6-mercaptopurine, 6-thioguanine, cytarabine, 5-fluorouracil decarbazine), alkylating agents (e.g., mechlorethamine, thioepa chlorambucil, melphalan, carmustine (BSNU) and lomustine (CCNU), cyclothosphamide, busulfan, dibromomannitol, streptozotocin, mitomycin C, and cisdichlorodiamine platinum (II) (DDP) cisplatin), anthracyclines (e.g., daunorubicin (formerly daunomycin) and doxorubicin), antibiotics (e.g., dactinomycin (formerly actinomycin), bleomycin, mithramycin, and anthramycin (AMC), and anti-mitotic agents (e.g., vincristine and vinblastine).

### B. Identifying and Characterizing the Heterodimeric Trivalent/Tetravalent Multispecific Antibodies of the Present Technology

[0231] Methods for identifying and/or screening the heterodimeric trivalent/tetravalent multispecific antibodies of the present technology. Methods useful to identify and screen antibodies that possess the desired specificity to a target antigen include any immunologically-mediated techniques known within the art. Components of an immune response can be detected in vitro by various methods that are well known to those of ordinary skill in the art. For example, (1) cytotoxic T lymphocytes can be incubated with radioactively labeled target cells and the lysis of these target cells detected by the release of radioactivity; (2) helper T lymphocytes can be incubated with antigens and antigen presenting cells and the synthesis and secretion of cytokines measured by standard methods (Windhagen A et al., Immunity, 2: 373-80, 1995); (3) antigen presenting cells can be incubated with whole protein antigen and the presentation of that antigen on MHC detected by either T lymphocyte activation assays or biophysical methods (Harding et al., Proc. Natl. Acad. Sci., 86: 4230-4, 1989); (4) mast cells can be incubated with reagents that cross-link their Fc-epsilon receptors and histamine release measured by enzyme immunoassay (Siraganian et al., TIPS, 4: 432-437, 1983); and (5) enzyme-linked immunosorbent assay (ELISA).

[0232] Similarly, products of an immune response in either a model organism (e.g., mouse) or a human subject can also be detected by various methods that are well known to those of ordinary skill in the art. For example, (1) the production of antibodies in response to vaccination can be readily detected by standard methods currently used in clinical laboratories, e.g., an ELISA; (2) the migration of immune cells to sites of inflammation can be detected by scratching the surface of skin and placing a sterile container to capture the migrating cells over scratch site (Peters et al., Blood, 72: 1310-5, 1988); (3) the proliferation of peripheral blood mononuclear cells (PBMCs) in response to mitogens or mixed lymphocyte reaction can be measured using ³H-thymidine; (4) the phagocytic capacity of granulocytes, macrophages, and other phagocytes in PBMCs can be measured by placing PBMCs in wells together with labeled particles (Peters et al., Blood, 72: 1310-5, 1988); and (5) the differentiation of immune system cells can be measured by labeling PBMCs with antibodies to CD molecules such as CD4 and CD8 and measuring the fraction of the PBMCs expressing these markers.

[0233] In one embodiment, heterodimeric trivalent/tetravalent multispecific antibodies of the present technology are selected using display of target antigen peptides on the surface of replicable genetic packages. See, e.g., U.S. Pat. Nos. 5,514,548; 5,837,500; 5,871,907; 5,885,793; 5,969,108; 6,225,447; 6,291,650; 6,492,160; EP 585 287; EP 605522; EP 616640; EP 1024191; EP 589 877; EP 774 511; EP 844 306. Methods useful for producing/selecting a filamentous bacteriophage particle containing a phagemid genome encoding for a binding molecule with a desired specificity has been described. See, e.g., EP 774 511; U.S. Pat. Nos. 5,871,907; 5,969,108; 6,225,447; 6,291,650; 6,492,160.

[0234] In some embodiments, heterodimeric trivalent/tetravalent multispecific antibodies of the present technology are selected using display of target antigen peptides on the surface of a yeast host cell. Methods useful for the isolation of scFv polypeptides by yeast surface display have been described by Kieke et al., Protein Eng. 1997 November; 10(11): 1303-10.

[0235] In some embodiments, heterodimeric trivalent/tetravalent multispecific antibodies of the present technology are selected using ribosome display. Methods useful for identifying ligands in peptide libraries using ribosome display have been described by Mattheakis et al., Proc. Natl. Acad. Sci. USA 91: 9022-26, 1994; and Hanes et al., Proc. Natl. Acad. Sci. USA 94: 4937-42, 1997.

[0236] In certain embodiments, heterodimeric trivalent/tetravalent multispecific antibodies of the present technology are selected using tRNA display of target antigen peptides. Methods useful for in vitro selection of ligands using tRNA display have been described by Merryman et al., Chem. Biol., 9: 741-46, 2002.

[0237] In one embodiment, heterodimeric trivalent/tetravalent multispecific antibodies of the present technology are selected using RNA display. Methods useful for selecting peptides and proteins using RNA display libraries have been described by Roberts et al. Proc. Natl. Acad. Sci. USA, 94: 12297-302, 1997; and Nemoto et al., FEBS Lett., 414: 405-8, 1997. Methods useful for selecting peptides and proteins using unnatural RNA display libraries have been described by Frankel et al., Curr. Opin. Struct. Biol., 13: 506-12, 2003.

[0238] In some embodiments, heterodimeric trivalent/tetravalent multispecific antibodies of the present technology are expressed in the periplasm of gram negative bacteria and mixed with labeled target antigen. See WO 02/34886. In clones expressing recombinant polypeptides with affinity for a target antigen, the concentration of the labeled target antigen bound to the heterodimeric trivalent/tetravalent multispecific antibodies is increased and allows the cells to be isolated from the rest of the library as described in Harvey et al., Proc. Natl. Acad. Sci. 22: 9193-98 2004 and U.S. Pat. Publication No. 2004/0058403.

[0239] After selection of the desired heterodimeric trivalent/tetravalent multispecific antibodies, it is contemplated that said antibodies can be produced in large volume by any technique known to those skilled in the art, e.g., prokaryotic or eukaryotic cell expression and the like. For example, the heterodimeric trivalent/tetravalent multispecific antibodies can be produced by using conventional techniques to construct an expression vector that encodes an antibody heavy chain and/or light chain in which the CDRs and, if necessary, a minimal portion of the variable region framework, that are required to retain original species antibody binding specificity (as engineered according to the techniques described herein) are derived from the originating species antibody and the remainder of the antibody is derived from a target species immunoglobulin which can be manipulated as described herein, thereby producing a vector for the expression of a hybrid antibody heavy chain.

[0240] Measurement of Antigen Binding. In some embodiments, an antigen binding assay refers to an assay format wherein a target antigen and a heterodimeric trivalent/tetravalent multispecific antibody are mixed under conditions suitable for binding between the target antigen and the heterodimeric trivalent/tetravalent multispecific antibody and assessing the amount of binding between the target antigen and the heterodimeric trivalent/tetravalent multispecific antibody. The amount of binding is compared with a suitable control, which can be the amount of binding in the absence of the target antigen, the amount of the binding in the presence of a non-specific immunoglobulin composition, or both. The amount of binding can be assessed by any suitable method. Binding assay methods include, e.g., ELISA, radioimmunoassays, scintillation proximity assays, fluorescence energy transfer assays, liquid chromatography, membrane filtration assays, and the like. Biophysical assays for the direct measurement of target antigen binding to a heterodimeric trivalent/tetravalent multispecific antibody are, e.g., nuclear magnetic resonance, fluorescence, fluorescence polarization, surface plasmon resonance (BIACORE chips) and the like. Specific binding is determined by standard assays known in the art, e.g., radioligand binding assays, ELISA, FRET, immunoprecipitation, SPR, NMR (2D-NMR), mass spectroscopy and the like. If the specific binding of a candidate heterodimeric trivalent/tetravalent multispecific antibody is at least 1 percent greater than the binding observed in the absence of the candidate heterodimeric trivalent/tetravalent multispecific antibody, the candidate heterodimeric trivalent/tetravalent multi specific antibody is useful as a heterodimeric trivalent/tetravalent multispecific antibody of the present technology.

[0241] Measurement of Target Antigen Neutralization. As used here, “target antigen neutralization” refers to reduction of the activity and/or expression of a target antigen through the binding of a heterodimeric trivalent/tetravalent multispecific antibody disclosed herein. The capacity of heterodimeric trivalent/tetravalent multispecific antibodies of the present technology to neutralize activity/expression of a target antigen may be assessed in vitro or in vivo using methods known in the art.

### Uses of the Heterodimeric Trivalent/Tetravalent Multispecific Antibodies of the Present Technology

[0242] General. The heterodimeric trivalent/tetravalent multispecific antibodies of the present technology are useful in methods known in the art relating to the localization and/or quantitation of a target antigen (e.g., for use in measuring levels of the target antigen within appropriate physiological samples, for use in diagnostic methods, for use in imaging the target antigen, and the like). Antibodies of the present technology are useful to isolate a target antigen by standard techniques, such as affinity chromatography or immunoprecipitation. A heterodimeric trivalent/tetravalent multispecific antibody of the present technology can facilitate the purification of natural immunoreactive target antigens from biological samples, e.g., mammalian sera or cells as well as recombinantly-produced immunoreactive target antigens expressed in a host system. Moreover, heterodimeric trivalent/tetravalent multispecific antibodies can be used to detect an immunoreactive target antigen (e.g., in plasma, a cellular lysate or cell supernatant) in order to evaluate the abundance and pattern of expression of the immunoreactive molecule. The heterodimeric trivalent/tetravalent multispecific antibodies of the present technology can be used diagnostically to monitor immunoreactive target antigen levels in tissue as part of a clinical testing procedure, e.g., to determine the efficacy of a given treatment regimen. As noted above, the detection can be facilitated by coupling (i.e., physically linking) the heterodimeric trivalent/tetravalent multispecific antibodies of the present technology to a detectable sub stance.

[0243] Detection of target antigen. An exemplary method for detecting the presence or absence of an immunoreactive target antigen in a biological sample involves obtaining a biological sample from a test subject and contacting the biological sample with a heterodimeric trivalent/tetravalent multispecific antibody of the present technology capable of detecting an immunoreactive target antigen such that the presence of an immunoreactive target antigen is detected in the biological sample. Detection may be accomplished by means of a detectable label attached to the antibody.

[0244] The term “labeled” with regard to the heterodimeric trivalent/tetravalent multispecific antibody is intended to encompass direct labeling of the antibody by coupling (i.e., physically linking) a detectable substance to the antibody, as well as indirect labeling of the antibody by reactivity with another compound that is directly labeled, such as a secondary antibody. Examples of indirect labeling include detection of a primary antibody using a fluorescently-labeled secondary antibody and end-labeling of a DNA probe with biotin such that it can be detected with fluorescently-labeled streptavidin.

[0245] In some embodiments, the heterodimeric trivalent/tetravalent multispecific antibodies disclosed herein are conjugated to one or more detectable labels. For such uses, heterodimeric trivalent/tetravalent multispecific antibodies may be detectably labeled by covalent or non-covalent attachment of a chromogenic, enzymatic, radioisotopic, isotopic, fluorescent, toxic, chemiluminescent, nuclear magnetic resonance contrast agent or other label.

[0246] Examples of suitable chromogenic labels include diaminobenzidine and 4-hydroxyazo-benzene-2-carboxylic acid. Examples of suitable enzyme labels include malate dehydrogenase, staphylococcal nuclease, Δ-5-steroid isomerase, yeast-alcohol dehydrogenase, α-glycerol phosphate dehydrogenase, triose phosphate isomerase, peroxidase, alkaline phosphatase, asparaginase, glucose oxidase, β-galactosidase, ribonuclease, urease, catalase, glucose-6-phosphate dehydrogenase, glucoamylase, and acetylcholine esterase.

[0247] Examples of suitable radioisotopic labels include ³H, ¹¹¹In, ¹²⁵I, ¹³¹I, ³²P, ³⁵S, ¹⁴C, ⁵¹Cr, ⁵⁷To, ⁵⁸Co, ⁵⁹Fe, ⁷⁵Se, ¹⁵²Eu, ⁹⁰Y, ⁶⁷Cu, ²¹⁷Ci, ²¹¹At, ²¹²Pb, ⁴⁷Sc, ¹⁰⁹Pd, etc. ¹¹¹In is an exemplary isotope where in vivo imaging is used since it avoids the problem of dehalogenation of the ¹²⁵I or ¹³¹I-labeled heterodimeric trivalent/tetravalent multispecific antibodies by the liver. In addition, this isotope has a more favorable gamma emission energy for imaging (Perkins et al, Eur. J. Nucl. Med. 70:296-301 (1985); Carasquillo et al., J. Nucl. Med. 25:281-287 (1987)). For example, ¹¹¹In coupled to monoclonal antibodies with 1-(P-isothiocyanatobenzyl)-DPTA exhibits little uptake in non-tumorous tissues, particularly the liver, and enhances specificity of tumor localization (Esteban et al., J. Nucl. Med. 28:861-870 (1987)). Examples of suitable non-radioactive isotopic labels include ¹⁵⁷Gd, ⁵⁵Mn, ¹⁶²Dy, ⁵²Tr, and ⁵⁶Fe.

[0248] Examples of suitable fluorescent labels include an ¹⁵²Eu label, a fluorescein label, an isothiocyanate label, a rhodamine label, a phycoerythrin label, a phycocyanin label, an allophycocyanin label, a Green Fluorescent Protein (GFP) label, an o-phthaldehyde label, and a fluorescamine label. Examples of suitable toxin labels include diphtheria toxin, ricin, and cholera toxin.

[0249] Examples of chemiluminescent labels include a luminol label, an isoluminol label, an aromatic acridinium ester label, an imidazole label, an acridinium salt label, an oxalate ester label, a luciferin label, a luciferase label, and an aequorin label. Examples of nuclear magnetic resonance contrasting agents include heavy metal nuclei such as Gd, Mn, and iron.

[0250] The detection method of the present technology can be used to detect an immunoreactive target antigen in a biological sample in vitro as well as in vivo. In vitro techniques for detection of an immunoreactive target antigen include enzyme linked immunosorbent assays (ELISAs), Western blots, immunoprecipitations, radioimmunoassay, and immunofluorescence. Furthermore, in vivo techniques for detection of an immunoreactive target antigen include introducing into a subject a labeled heterodimeric trivalent/tetravalent multispecific antibody. For example, the heterodimeric trivalent/tetravalent multispecific antibody can be labeled with a radioactive marker whose presence and location in a subject can be detected by standard imaging techniques. In one embodiment, the biological sample contains target antigen molecules from the test subject.

[0251] Immunoassay and Imaging. A heterodimeric trivalent/tetravalent multispecific antibody of the present technology can be used to assay immunoreactive target antigen levels in a biological sample (e.g., human plasma) using antibody-based techniques. For example, protein expression in tissues can be studied with classical immunohistological methods. Jalkanen, M. et al., J. Cell. Biol. 101: 976-985, 1985; Jalkanen, M. et al., J. Cell. Biol. 105: 3087-3096, 1987. Other antibody-based methods useful for detecting protein gene expression include immunoassays, such as the enzyme linked immunosorbent assay (ELISA) and the radioimmunoassay (RIA). Suitable antibody assay labels are known in the art and include enzyme labels, such as, glucose oxidase, and radioisotopes or other radioactive agent, such as iodine (¹²⁵I, ¹²¹I, ¹³¹I), and carbon (¹⁴C), sulfur (³⁵S), tritium (³H), indium (¹¹²In), and technetium (⁹⁹mTc), and fluorescent labels, such as fluorescein, rhodamine, and green fluorescent protein (GFP), as well as biotin.

[0252] In addition to assaying immunoreactive target antigen levels in a biological sample, heterodimeric trivalent/tetravalent multispecific antibodies of the present technology may be used for in vivo imaging of the target antigen. Antibodies useful for this method include those detectable by X-radiography, NMR or ESR. For X-radiography, suitable labels include radioisotopes such as barium or cesium, which emit detectable radiation but are not overtly harmful to the subject. Suitable markers for NMR and ESR include those with a detectable characteristic spin, such as deuterium, which can be incorporated into the heterodimeric trivalent/tetravalent multispecific antibodies by labeling of nutrients for the relevant scFv clone.

[0253] A heterodimeric trivalent/tetravalent multispecific antibody which has been labeled with an appropriate detectable imaging moiety, such as a radioisotope (e.g., ¹³¹I, ¹¹²In, ⁹⁹mTc), a radio-opaque substance, or a material detectable by nuclear magnetic resonance, is introduced (e.g., parenterally, subcutaneously, or intraperitoneally) into the subject. It will be understood in the art that the size of the subject and the imaging system used will determine the quantity of imaging moiety needed to produce diagnostic images. In the case of a radioisotope moiety, for a human subject, the quantity of radioactivity injected will normally range from about 5 to 20 millicuries of ⁹⁹mTc. The labeled heterodimeric trivalent/tetravalent multispecific antibody will then accumulate at the location of cells which contain the specific target antigen. For example, labeled heterodimeric trivalent/tetravalent multispecific antibodies of the present technology will accumulate within the subject in cells and tissues in which the target antigen has localized.

[0254] Thus, the present technology provides a diagnostic method of a medical condition, which involves: (a) assaying the expression of immunoreactive target antigen by measuring binding of a heterodimeric trivalent/tetravalent multispecific antibody of the present technology in cells or body fluid of an individual; (b) comparing the amount of immunoreactive target antigen present in the sample with a standard reference, wherein an increase or decrease in immunoreactive target antigen levels compared to the standard is indicative of a medical condition.

[0255] Affinity Purification. The heterodimeric trivalent/tetravalent multispecific antibodies of the present technology may be used to purify immunoreactive target antigen from a sample. In some embodiments, the antibodies are immobilized on a solid support. Examples of such solid supports include plastics such as polycarbonate, complex carbohydrates such as agarose and sepharose, acrylic resins and such as polyacrylamide and latex beads. Techniques for coupling antibodies to such solid supports are well known in the art (Weir et al., “Handbook of Experimental Immunology” 4th Ed., Blackwell Scientific Publications, Oxford, England, Chapter 10 (1986); Jacoby et al., Meth. Enzym. 34 Academic Press, N.Y. (1974)).

[0256] The simplest method to bind the antigen to the antibody-support matrix is to collect the beads in a column and pass the antigen solution down the column. The efficiency of this method depends on the contact time between the immobilized antibody and the antigen, which can be extended by using low flow rates. The immobilized antibody captures the antigen as it flows past. Alternatively, an antigen can be contacted with the antibody-support matrix by mixing the antigen solution with the support (e.g., beads) and rotating or rocking the slurry, allowing maximum contact between the antigen and the immobilized antibody. After the binding reaction has been completed, the slurry is passed into a column for collection of the beads. The beads are washed using a suitable washing buffer and then the pure or substantially pure antigen is eluted.

[0257] An antibody or target antigen of interest can be conjugated to a solid support, such as a bead. In addition, a first solid support such as a bead can also be conjugated, if desired, to a second solid support, which can be a second bead or other support, by any suitable means, including those disclosed herein for conjugation of a molecule to a support. Accordingly, any of the conjugation methods and means disclosed herein with reference to conjugation of a molecule to a solid support can also be applied for conjugation of a first support to a second support, where the first and second solid support can be the same or different.

[0258] Appropriate linkers, which can be cross-linking agents, for use for conjugating a molecule to a solid support include a variety of agents that can react with a functional group present on a surface of the support, or with the molecule, or both. Reagents useful as cross-linking agents include homo-bi-functional and, in particular, hetero-bi-functional reagents. Useful bi-functional cross-linking agents include, but are not limited to, N-SIAB, dimaleimide, DTNB, N-SATA, N-SPDP, SMCC and 6-HYNIC. In one exemplary embodiment, a cross-linking agent can be selected to provide a selectively cleavable bond between a target polypeptide and the solid support. For example, a photolabile cross-linker, such as 3-amino-(2-nitrophenyl)propionic acid can be employed as a means for cleaving a target polypeptide from a solid support. (Brown et al., Mol. Divers, pp, 4-12 (1995); Rothschild et al., Nucl. Acids Res., 24:351-66 (1996); and U.S. Pat. No. 5,643,722). Other cross-linking reagents are well-known in the art. (See, e.g., Wong (1991), supra; and Hermanson (1996), supra).

[0259] An antibody or target polypeptide can be immobilized on a solid support, such as a bead, through a covalent amide bond formed between a carboxyl group functionalized bead and the amino terminus of the target polypeptide or, conversely, through a covalent amide bond formed between an amino group functionalized bead and the carboxyl terminus of the target polypeptide. In addition, a bi-functional trityl linker can be attached to the support, e.g., to the 4-nitrophenyl active ester on a resin, such as a Wang resin, through an amino group or a carboxyl group on the resin via an amino resin. Using a bi-functional trityl approach, the solid support can require treatment with a volatile acid, such as formic acid or trifluoroacetic acid to ensure that the target polypeptide is cleaved and can be removed. In such a case, the target polypeptide can be deposited as a beadless patch at the bottom of a well of a solid support or on the flat surface of a solid support. After addition of a matrix solution, the target polypeptide can be desorbed into a MS.

[0260] Hydrophobic trityl linkers can also be exploited as acid-labile linkers by using a volatile acid or an appropriate matrix solution, e.g., a matrix solution containing 3-HPA, to cleave an amino linked trityl group from the target polypeptide. Acid lability can also be changed. For example, trityl, monomethoxytrityl, dimethoxytrityl or trimethoxytrityl can be changed to the appropriate p-substituted, or more acid-labile tritylamine derivatives, of the target polypeptide, i.e., trityl ether and tritylamine bonds can be made to the target polypeptide. Accordingly, a target polypeptide can be removed from a hydrophobic linker, e.g., by disrupting the hydrophobic attraction or by cleaving tritylether or tritylamine bonds under acidic conditions, including, if desired, under typical MS conditions, where a matrix, such as 3-HPA acts as an acid.

[0261] Orthogonally cleavable linkers can also be useful for binding a first solid support, e.g., a bead to a second solid support, or for binding a molecule of interest to a solid support. Using such linkers, a first solid support, e.g., a bead, can be selectively cleaved from a second solid support, without cleaving the target antigen from the support; the target antigen then can be cleaved from the bead at a later time. For example, a disulfide linker, which can be cleaved using a reducing agent, such as DTT, can be employed to bind a bead to a second solid support, and an acid cleavable bi-functional trityl group could be used to immobilize a target antigen to the support. As desired, the linkage of the target antigen to the solid support can be cleaved first, e.g., leaving the linkage between the first and second support intact. Trityl linkers can provide a covalent or hydrophobic conjugation and, regardless of the nature of the conjugation, the trityl group is readily cleaved in acidic conditions.

[0262] For example, a bead can be bound to a second support through a linking group which can be selected to have a length and a chemical nature such that high density binding of the beads to the solid support, or high density binding of the target antigens to the beads, is promoted. Such a linking group can have, e.g., “tree-like” structure, thereby providing a multiplicity of functional groups per attachment site on a solid support. Examples of such linking group; include polylysine, polyglutamic acid, penta-erythrole and tris-hydroxy-aminomethane.

[0263] Noncovalent Binding Association. An antibody or target antigen can be conjugated to a solid support, or a first solid support can also be conjugated to a second solid support, through a noncovalent interaction. For example, a magnetic bead made of a ferromagnetic material, which is capable of being magnetized, can be attracted to a magnetic solid support, and can be released from the support by removal of the magnetic field. Alternatively, the solid support can be provided with an ionic or hydrophobic moiety, which can allow the interaction of an ionic or hydrophobic moiety, respectively, with a target antigen, e.g., a polypeptide containing an attached trityl group or with a second solid support having hydrophobic character.

[0264] A solid support can also be provided with a member of a specific binding pair and, therefore, can be conjugated to a target antigen or a second solid support containing a complementary binding moiety. For example, a bead coated with avidin or with streptavidin can be bound to a target antigen (e.g., a polypeptide) having a biotin moiety incorporated therein, or to a second solid support coated with biotin or derivative of biotin, such as iminobiotin.

[0265] It should be recognized that any of the binding members disclosed herein or otherwise known in the art can be reversed. Thus, biotin, e.g., can be incorporated into either a target antigen or a solid support and, conversely, avidin or other biotin binding moiety would be incorporated into the support or the target antigen, respectively. Other specific binding pairs contemplated for use herein include, but are not limited to, hormones and their receptors, enzyme, and their substrates, a nucleotide sequence and its complementary sequence, an antibody and the antigen to which it interacts specifically, and other such pairs known to those skilled in the art.

### A. Diagnostic Uses

[0266] General. The heterodimeric trivalent/tetravalent multispecific antibodies of the present technology are useful in diagnostic methods. As such, the present technology provides methods using the antibodies in the diagnosis of activity of a molecule of interest in a subject. Heterodimeric trivalent/tetravalent multispecific antibodies of the present technology may be selected such that they have any level of epitope binding specificity and binding affinity to a target antigen. In general, the higher the binding affinity of an antibody, the more stringent wash conditions can be performed in an immunoassay to remove nonspecifically bound material without removing the molecule of interest. Accordingly, heterodimeric trivalent/tetravalent multispecific antibodies of the present technology useful in diagnostic assays usually have binding affinities of about 10⁸M⁻¹, 10⁹M⁻¹, 10¹⁰ M⁻¹, 10¹¹ M⁻¹ or 10¹² M⁻¹. Further, it is desirable that heterodimeric trivalent/tetravalent multispecific antibodies used as diagnostic reagents have a sufficient kinetic on-rate to reach equilibrium under standard conditions in at least 12 h, at least five (5) h, or at least one (1) hour.

[0267] Heterodimeric trivalent/tetravalent multispecific antibodies can be used to detect an immunoreactive target antigen in a variety of standard assay formats. Such formats include immunoprecipitation, Western blotting, ELISA, radioimmunoassay, and immunometric assays. See Harlow & Lane, Antibodies, A Laboratory Manual (Cold Spring Harbor Publications, New York, 1988); U.S. Pat. Nos. 3,791,932; 3,839,153; 3,850,752; 3,879,262; 4,034,074, 3,791,932; 3,817,837; 3,839,153; 3,850,752; 3,850,578; 3,853,987; 3,867,517; 3,879,262; 3,901,654; 3,935,074; 3,984,533; 3,996,345; 4,034,074; and 4,098,876. Biological samples can be obtained from any tissue or body fluid of a subject. In certain embodiments, the subject is at an early stage of cancer. In one embodiment, the early stage of cancer is determined by the level or expression pattern of a target antigen in a sample obtained from the subject. In certain embodiments, the sample is selected from the group consisting of urine, blood, serum, plasma, saliva, amniotic fluid, cerebrospinal fluid (CSF), and biopsied body tissue.

[0268] Immunometric or sandwich assays are one format for the diagnostic methods of the present technology. See U.S. Pat. Nos. 4,376,110, 4,486,530, 5,914,241, and 5,965,375. Such assays use one antibody, e.g., a heterodimeric trivalent/tetravalent multispecific antibody or a population of heterodimeric trivalent/tetravalent multispecific antibodies immobilized to a solid phase, and another heterodimeric trivalent/tetravalent multispecific antibody or a population of heterodimeric trivalent/tetravalent multispecific antibodies in solution. Typically, the solution heterodimeric trivalent/tetravalent multispecific antibody or population of heterodimeric trivalent/tetravalent multispecific antibodies is labeled. If an antibody population is used, the population can contain antibodies binding to different epitope specificities within the target antigen. Accordingly, the same population can be used for both solid phase and solution antibody. If heterodimeric trivalent/tetravalent multispecific monoclonal antibodies are used, first and second monoclonal heterodimeric trivalent/tetravalent multispecific antibodies having different binding specificities are used for the solid and solution phase. Solid phase (also referred to as “capture”) and solution (also referred to as “detection”) antibodies can be contacted with target antigen in either order or simultaneously. If the solid phase antibody is contacted first, the assay is referred to as being a forward assay. Conversely, if the solution antibody is contacted first, the assay is referred to as being a reverse assay. If the target is contacted with both antibodies simultaneously, the assay is referred to as a simultaneous assay. After contacting the target antigen with the heterodimeric trivalent/tetravalent multispecific antibody, a sample is incubated for a period that usually varies from about 10 min to about 24 hr and is usually about 1 hr. A wash step is then performed to remove components of the sample not specifically bound to the heterodimeric trivalent/tetravalent multispecific antibody being used as a diagnostic reagent. When solid phase and solution antibodies are bound in separate steps, a wash can be performed after either or both binding steps. After washing, binding is quantified, typically by detecting a label linked to the solid phase through binding of labeled solution antibody. Usually for a given pair of antibodies or populations of antibodies and given reaction conditions, a calibration curve is prepared from samples containing known concentrations of target antigen. Concentrations of the immunoreactive target antigen in samples being tested are then read by interpolation from the calibration curve (i.e., standard curve). Analyte can be measured either from the amount of labeled solution antibody bound at equilibrium or by kinetic measurements of bound labeled solution antibody at a series of time points before equilibrium is reached. The slope of such a curve is a measure of the concentration of the target antigen in a sample.

[0269] Suitable supports for use in the above methods include, e.g., nitrocellulose membranes, nylon membranes, and derivatized nylon membranes, and also particles, such as agarose, a dextran-based gel, dipsticks, particulates, microspheres, magnetic particles, test tubes, microtiter wells, SEPHADEX™ (Amersham Pharmacia Biotech, Piscataway N.J.), and the like. Immobilization can be by absorption or by covalent attachment. Optionally, heterodimeric trivalent/tetravalent multispecific antibodies can be joined to a linker molecule, such as biotin for attachment to a surface bound linker, such as avidin.

[0270] In some embodiments, the present disclosure provides a heterodimeric trivalent/tetravalent multispecific antibody of the present technology conjugated to a diagnostic agent. The diagnostic agent may comprise a radioactive or non-radioactive label, a contrast agent (such as for magnetic resonance imaging, computed tomography or ultrasound), and the radioactive label can be a gamma-, beta-, alpha-, Auger electron-, or positron-emitting isotope. A diagnostic agent is a molecule which is administered conjugated to an antibody moiety, i.e., antibody or antibody fragment, or subfragment, and is useful in diagnosing or detecting a disease by locating the cells containing the antigen. Radioactive levels emitted by the antibody may be detected using positron emission tomography or single photon emission computed tomography.

[0271] Useful diagnostic agents include, but are not limited to, radioisotopes, dyes (such as with the biotin-streptavidin complex), contrast agents, fluorescent compounds or molecules and enhancing agents (e.g., paramagnetic ions) for magnetic resonance imaging (MRI). U.S. Pat. No. 6,331,175 describes MRI technique and the preparation of antibodies conjugated to a MRI enhancing agent and is incorporated in its entirety by reference. In some embodiments, the diagnostic agents are selected from the group consisting of radioisotopes, enhancing agents for use in magnetic resonance imaging, and fluorescent compounds. In order to load an antibody component with radioactive metals or paramagnetic ions, it may be necessary to react it with a reagent having a long tail to which are attached a multiplicity of chelating groups for binding the ions. Such a tail can be a polymer such as a polylysine, polysaccharide, or other derivatized or derivatizable chain having pendant groups to which can be bound chelating groups such as, e.g., ethylenediaminetetraacetic acid (EDTA), diethylenetriaminepentaacetic acid (DTPA), porphyrins, polyamines, crown ethers, bis-thiosemicarbazones, polyoximes, and like groups known to be useful for this purpose. Chelates may be coupled to the antibodies of the present technology using standard chemistries. The chelate is normally linked to the antibody by a group which enables formation of a bond to the molecule with minimal loss of immunoreactivity and minimal aggregation and/or internal cross-linking. Other methods and reagents for conjugating chelates to antibodies are disclosed in U.S. Pat. No. 4,824,659. Particularly useful metal-chelate combinations include 2-benzyl-DTPA and its monomethyl and cyclohexyl analogs, used with diagnostic isotopes for radio-imaging. The same chelates, when complexed with non-radioactive metals, such as manganese, iron and gadolinium are useful for MM, when used along with the heterodimeric trivalent/tetravalent multispecific antibodies of the present technology.

### B. Therapeutic Uses

[0272] The immunoglobulin-related compositions (e.g., heterodimeric trivalent/tetravalent multispecific antibodies) of the present technology are useful for the treatment of a disease or condition. Exemplary diseases or conditions include, but are not limited to cardiovascular disease, diabetes, autoimmune disease, dementia, Parkinson's disease, cancer or Alzheimer's disease. Such treatment can be used in patients identified as having pathological levels of a molecule of interest (e.g., those diagnosed by the methods described herein) or in patients diagnosed with a disease known to be associated with such pathological levels. In one aspect, the present disclosure provides a method for treating cancer in a subject in need thereof, comprising administering to the subject an effective amount of a heterodimeric trivalent/tetravalent multispecific antibody of the present technology. Examples of cancers that can be treated by the antibodies of the present technology include, but are not limited to: lung cancer, colorectal cancer, skin cancer, breast cancer, ovarian cancer, leukemia, pancreatic cancer, and gastric cancer.

[0273] The compositions of the present technology may be employed in conjunction with other therapeutic agents useful in the treatment of cancer. For example, the antibodies of the present technology may be separately, sequentially or simultaneously administered with at least one additional therapeutic agent-selected from the group consisting of alkylating agents, platinum agents, taxanes, vinca agents, anti-estrogen drugs, aromatase inhibitors, ovarian suppression agents, VEGF/VEGFR inhibitors, EGF/EGFR inhibitors, PARP inhibitors, cytostatic alkaloids, cytotoxic antibiotics, antimetabolites, endocrine/hormonal agents, bisphosphonate therapy agents and targeted biological therapy agents (e.g., therapeutic peptides described in U.S. Pat. No. 6,306,832, WO 2012007137, WO 2005000889, WO 2010096603 etc.). In some embodiments, the at least one additional therapeutic agent is a chemotherapeutic agent. Specific chemotherapeutic agents include, but are not limited to, cyclophosphamide, fluorouracil (or 5-fluorouracil or 5-FU), methotrexate, edatrexate (10-ethyl-10-deaza-aminopterin), thiotepa, carboplatin, cisplatin, taxanes, paclitaxel, protein-bound paclitaxel, docetaxel, vinorelbine, tamoxifen, raloxifene, toremifene, fulvestrant, gemcitabine, irinotecan, ixabepilone, temozolmide, topotecan, vincristine, vinblastine, eribulin, mutamycin, capecitabine, anastrozole, exemestane, letrozole, leuprolide, abarelix, buserlin, goserelin, megestrol acetate, risedronate, pamidronate, ibandronate, alendronate, denosumab, zoledronate, trastuzumab, tykerb, anthracyclines (e.g., daunorubicin and doxorubicin), bevacizumab, oxaliplatin, melphalan, etoposide, mechlorethamine, bleomycin, microtubule poisons, annonaceous acetogenins, or combinations thereof.

[0274] In another aspect, the antibodies of the present technology may be separately, sequentially or simultaneously administered with one or more therapeutic agents useful in the treatment of Alzheimer's disease. Examples of such therapeutic agents include acetylcholine esterase inhibitors such as tacrine (tetrahydroaminoacridine), donepezil hydrochloride, and rivastigmine; gamma-secretase inhibitors; anti-inflammatory agents such as cyclooxygenase II inhibitors; antioxidants such as Vitamin E and ginkolides; immunological approaches, such as, for example, immunization with A beta peptide or administration of anti-A beta peptide antibodies; statins; and direct or indirect neurotropic agents such as Cerebrolysin®, AIT-082 (Emilieu, 2000, Arch. Neurol. 57:454).

[0275] The compositions of the present technology may optionally be administered as a single bolus to a subject in need thereof. Alternatively, the dosing regimen may comprise multiple administrations performed at various times after the appearance of tumors or amyloid plaques.

[0276] Administration can be carried out by any suitable route, including orally, intranasally, parenterally (intravenously, intramuscularly, intraperitoneally, or subcutaneously), rectally, intracranially, intrathecally, or topically. Administration includes self-administration and the administration by another. It is also to be appreciated that the various modes of treatment of medical conditions as described are intended to mean “substantial”, which includes total but also less than total treatment, and wherein some biologically or medically relevant result is achieved.

[0277] In some embodiments, the antibodies of the present technology comprise pharmaceutical formulations which may be administered to subjects in need thereof in one or more doses. Dosage regimens can be adjusted to provide the desired response (e.g., a therapeutic response).

[0278] Typically, an effective amount of the antibody compositions of the present technology, sufficient for achieving a therapeutic effect, range from about 0.000001 mg per kilogram body weight per day to about 10,000 mg per kilogram body weight per day. Typically, the dosage ranges are from about 0.0001 mg per kilogram body weight per day to about 100 mg per kilogram body weight per day. For administration of heterodimeric trivalent/tetravalent multispecific antibodies, the dosage ranges from about 0.0001 to 100 mg/kg, and more usually 0.01 to 5 mg/kg every week, every two weeks or every three weeks, of the subject body weight. For example, dosages can be 1 mg/kg body weight or 10 mg/kg body weight every week, every two weeks or every three weeks or within the range of 1-10 mg/kg every week, every two weeks or every three weeks. In one embodiment, a single dosage of antibody ranges from 0.1-10,000 micrograms per kg body weight. In one embodiment, antibody concentrations in a carrier range from 0.2 to 2000 micrograms per delivered milliliter. An exemplary treatment regime entails administration once per every two weeks or once a month or once every 3 to 6 months. Heterodimeric trivalent/tetravalent multispecific antibodies may be administered on multiple occasions. Intervals between single dosages can be hourly, daily, weekly, monthly or yearly. Intervals can also be irregular as indicated by measuring blood levels of the antibody in the subject. In some methods, dosage is adjusted to achieve a serum antibody concentration in the subject of from about 75 μg/mL to about 125 μg/mL, 100 μg/mL to about 150 μg/mL, from about 125 μg/mL to about 175 μg/mL, or from about 150 μg/mL to about 200 μg/mL. Alternatively, heterodimeric trivalent/tetravalent multispecific antibodies can be administered as a sustained release formulation, in which case less frequent administration is required. Dosage and frequency vary depending on the half-life of the antibody in the subject. The dosage and frequency of administration can vary depending on whether the treatment is prophylactic or therapeutic. In prophylactic applications, a relatively low dosage is administered at relatively infrequent intervals over a long period of time. In therapeutic applications, a relatively high dosage at relatively short intervals is sometimes required until progression of the disease is reduced or terminated, or until the subject shows partial or complete amelioration of symptoms of disease. Thereafter, the patient can be administered a prophylactic regime.

[0279] Toxicity. Optimally, an effective amount (e.g., dose) of heterodimeric trivalent/tetravalent multispecific antibody described herein will provide therapeutic benefit without causing substantial toxicity to the subject. Toxicity of the heterodimeric trivalent/tetravalent multispecific antibody described herein can be determined by standard pharmaceutical procedures in cell cultures or experimental animals, e.g., by determining the LD₅₀ (the dose lethal to 50% of the population) or the LD₁₀₀ (the dose lethal to 100% of the population). The dose ratio between toxic and therapeutic effect is the therapeutic index. The data obtained from these cell culture assays and animal studies can be used in formulating a dosage range that is not toxic for use in human. The dosage of the heterodimeric trivalent/tetravalent multispecific antibody described herein lies within a range of circulating concentrations that include the effective dose with little or no toxicity. The dosage can vary within this range depending upon the dosage form employed and the route of administration utilized. The exact formulation, route of administration and dosage can be chosen by the individual physician in view of the subject's condition. See, e.g., Fingl et al., In: The Pharmacological Basis of Therapeutics, Ch. 1 (1975).

### Formulations of Pharmaceutical Compositions

[0280] Formulations of Pharmaceutical Compositions. According to the methods of the present technology, the heterodimeric trivalent/tetravalent multispecific antibodies can be incorporated into pharmaceutical compositions suitable for administration. The pharmaceutical compositions generally comprise recombinant or substantially purified antibody and a pharmaceutically-acceptable carrier in a form suitable for administration to a subject. Pharmaceutically-acceptable carriers are determined in part by the particular composition being administered, as well as by the particular method used to administer the composition. Accordingly, there is a wide variety of suitable formulations of pharmaceutical compositions for administering the antibody compositions (See, e.g., Remington's Pharmaceutical Sciences, Mack Publishing Co., Easton, Pa. 18^{th} ed., 1990). The pharmaceutical compositions are generally formulated as sterile, substantially isotonic and in full compliance with all Good Manufacturing Practice (GMP) regulations of the U.S. Food and Drug Administration.

[0281] The terms “pharmaceutically-acceptable,” “physiologically-tolerable,” and grammatical variations thereof, as they refer to compositions, carriers, diluents and reagents, are used interchangeably and represent that the materials are capable of administration to a subject without the production of undesirable physiological effects to a degree that would prohibit administration of the composition. For example, “pharmaceutically-acceptable excipient” means an excipient that is useful in preparing a pharmaceutical composition that is generally safe, non-toxic, and desirable, and includes excipients that are acceptable for veterinary use as well as for human pharmaceutical use. Such excipients can be solid, liquid, semisolid, or, in the case of an aerosol composition, gaseous. “Pharmaceutically-acceptable salts and esters” means salts and esters that are pharmaceutically-acceptable and have the desired pharmacological properties. Such salts include salts that can be formed where acidic protons present in the composition are capable of reacting with inorganic or organic bases. Suitable inorganic salts include those formed with the alkali metals, e.g., sodium and potassium, magnesium, calcium, and aluminum. Suitable organic salts include those formed with organic bases such as the amine bases, e.g., ethanolamine, diethanolamine, triethanolamine, tromethamine, N-methylglucamine, and the like. Such salts also include acid addition salts formed with inorganic acids (e.g., hydrochloric and hydrobromic acids) and organic acids (e.g., acetic acid, citric acid, maleic acid, and the alkane- and arene-sulfonic acids such as methanesulfonic acid and benzenesulfonic acid). Pharmaceutically-acceptable esters include esters formed from carboxy, sulfonyloxy, and phosphonoxy groups present in the heterodimeric trivalent/tetravalent multispecific antibody, e.g., C1-6 alkyl esters. When there are two acidic groups present, a pharmaceutically-acceptable salt or ester can be a mono-acid-mono-salt or ester or a di-salt or ester; and similarly where there are more than two acidic groups present, some or all of such groups can be salified or esterified. A heterodimeric trivalent/tetravalent multispecific antibody named in this technology can be present in unsalified or unesterified form, or in salified and/or esterified form, and the naming of such heterodimeric trivalent/tetravalent multispecific antibody is intended to include both the original (unsalified and unesterified) compound and its pharmaceutically-acceptable salts and esters. Also, certain embodiments of the present technology can be present in more than one stereoisomeric form, and the naming of such heterodimeric trivalent/tetravalent multispecific antibody is intended to include all single stereoisomers and all mixtures (whether racemic or otherwise) of such stereoisomers. A person of ordinary skill in the art, would have no difficulty determining the appropriate timing, sequence and dosages of administration for particular drugs and compositions of the present technology.

[0282] Examples of such carriers or diluents include, but are not limited to, water, saline, Ringer's solutions, dextrose solution, and 5% human serum albumin. Liposomes and non-aqueous vehicles such as fixed oils may also be used. The use of such media and compounds for pharmaceutically active substances is well known in the art. Except insofar as any conventional media or compound is incompatible with the heterodimeric trivalent/tetravalent multispecific antibody, use thereof in the compositions is contemplated. Supplementary active compounds can also be incorporated into the compositions.

[0283] A pharmaceutical composition of the present technology is formulated to be compatible with its intended route of administration. The heterodimeric trivalent/tetravalent multispecific antibody compositions of the present technology can be administered by parenteral, topical, intravenous, oral, subcutaneous, intraarterial, intradermal, transdermal, rectal, intracranial, intrathecal, intraperitoneal, intranasal; or intramuscular routes, or as inhalants. The heterodimeric trivalent/tetravalent multispecific antibody can optionally be administered in combination with other agents that are at least partly effective in treating a disease or medical condition described herein.

[0284] Solutions or suspensions used for parenteral, intradermal, or subcutaneous application can include the following components: a sterile diluent such as water for injection, saline solution, fixed oils, polyethylene glycols, glycerine, propylene glycol or other synthetic solvents; antibacterial compounds such as benzyl alcohol or methyl parabens; antioxidants such as ascorbic acid or sodium bisulfite; chelating compounds such as ethylenediaminetetraacetic acid (EDTA); buffers such as acetates, citrates or phosphates, and compounds for the adjustment of tonicity such as sodium chloride or dextrose. The pH can be adjusted with acids or bases, such as hydrochloric acid or sodium hydroxide. The parenteral preparation can be enclosed in ampoules, disposable syringes or multiple dose vials made of glass or plastic.

[0285] Pharmaceutical compositions suitable for injectable use include sterile aqueous solutions (where water soluble) or dispersions and sterile powders for the extemporaneous preparation of sterile injectable solutions or dispersion. For intravenous administration, suitable carriers include physiological saline, bacteriostatic water, Cremophor EL™ (BASF, Parsippany, N.J.) or phosphate buffered saline (PBS). In all cases, the composition must be sterile and should be fluid to the extent that easy syringeability exists. It must be stable under the conditions of manufacture and storage and must be preserved against the contaminating action of microorganisms such as bacteria and fungi. The carrier can be a solvent or dispersion medium containing, e.g., water, ethanol, polyol (e.g., glycerol, propylene glycol, and liquid polyethylene glycol, and the like), and suitable mixtures thereof. The proper fluidity can be maintained, e.g., by the use of a coating such as lecithin, by the maintenance of the required particle size in the case of dispersion and by the use of surfactants. Prevention of the action of microorganisms can be achieved by various antibacterial and antifungal compounds, e.g., parabens, chlorobutanol, phenol, ascorbic acid, thimerosal, and the like. In many cases, it will be desirable to include isotonic compounds, e.g., sugars, polyalcohols such as manitol, sorbitol, sodium chloride in the composition. Prolonged absorption of the injectable compositions can be brought about by including in the composition a compound which delays absorption, e.g., aluminum monostearate and gelatin.

[0286] Sterile injectable solutions can be prepared by incorporating a heterodimeric trivalent/tetravalent multispecific antibody of the present technology in the required amount in an appropriate solvent with one or a combination of ingredients enumerated above, as required, followed by filtered sterilization. Generally, dispersions are prepared by incorporating the heterodimeric trivalent/tetravalent multispecific antibody into a sterile vehicle that contains a basic dispersion medium and the required other ingredients from those enumerated above. In the case of sterile powders for the preparation of sterile injectable solutions, methods of preparation are vacuum drying and freeze-drying that yields a powder of the active ingredient plus any additional desired ingredient from a previously sterile-filtered solution thereof. The antibodies of the present technology can be administered in the form of a depot injection or implant preparation which can be formulated in such a manner as to permit a sustained or pulsatile release of the active ingredient.

[0287] Oral compositions generally include an inert diluent or an edible carrier. They can be enclosed in gelatin capsules or compressed into tablets. For the purpose of oral therapeutic administration, the heterodimeric trivalent/tetravalent multispecific antibody can be incorporated with excipients and used in the form of tablets, troches, or capsules. Oral compositions can also be prepared using a fluid carrier for use as a mouthwash, wherein the compound in the fluid carrier is applied orally and swished and expectorated or swallowed. Pharmaceutically compatible binding compounds, and/or adjuvant materials can be included as part of the composition. The tablets, pills, capsules, troches and the like can contain any of the following ingredients, or compounds of a similar nature: a binder such as microcrystalline cellulose, gum tragacanth or gelatin; an excipient such as starch or lactose, a disintegrating compound such as alginic acid, Primogel, or corn starch; a lubricant such as magnesium stearate or Sterotes; a glidant such as colloidal silicon dioxide; a sweetening compound such as sucrose or saccharin; or a flavoring compound such as peppermint, methyl salicylate, or orange flavoring.

[0288] For administration by inhalation, the heterodimeric trivalent/tetravalent multispecific antibody is delivered in the form of an aerosol spray from pressured container or dispenser which contains a suitable propellant, e.g., a gas such as carbon dioxide, or a nebulizer.

[0289] Systemic administration can also be by transmucosal or transdermal means. For transmucosal or transdermal administration, penetrants appropriate to the barrier to be permeated are used in the formulation. Such penetrants are generally known in the art, and include, e.g., for transmucosal administration, detergents, bile salts, and fusidic acid derivatives. Transmucosal administration can be accomplished through the use of nasal sprays or suppositories. For transdermal administration, the heterodimeric trivalent/tetravalent multispecific antibody is formulated into ointments, salves, gels, or creams as generally known in the art.

[0290] The heterodimeric trivalent/tetravalent multispecific antibody can also be prepared as pharmaceutical compositions in the form of suppositories (e.g., with conventional suppository bases such as cocoa butter and other glycerides) or retention enemas for rectal delivery.

[0291] In one embodiment, the heterodimeric trivalent/tetravalent multispecific antibody is prepared with carriers that will protect the heterodimeric trivalent/tetravalent multispecific antibody against rapid elimination from the body, such as a controlled release formulation, including implants and microencapsulated delivery systems. Biodegradable, biocompatible polymers can be used, such as ethylene vinyl acetate, polyanhydrides, polyglycolic acid, collagen, polyorthoesters, and polylactic acid. Methods for preparation of such formulations will be apparent to those skilled in the art. The materials can also be obtained commercially from Alza Corporation and Nova Pharmaceuticals, Inc. Liposomal suspensions (including liposomes targeted to infected cells with monoclonal antibodies to viral antigens) can also be used as pharmaceutically-acceptable carriers. These can be prepared according to methods known to those skilled in the art, e.g., as described in U.S. Pat. No. 4,522,811.

### Kits

[0292] The present technology provides kits for the detection and/or treatment of cancer, comprising at least one heterodimeric trivalent/tetravalent multispecific antibody composition described herein, or a functional variant (e.g., substitutional variant) thereof. Optionally, the above described components of the kits of the present technology are packed in suitable containers and labeled for diagnosis and/or treatment of cancer. The above-mentioned components may be stored in unit or multi-dose containers, for example, sealed ampoules, vials, bottles, syringes, and test tubes, as an aqueous, preferably sterile, solution or as a lyophilized, preferably sterile, formulation for reconstitution. The kit may further comprise a second container which holds a diluent suitable for diluting the pharmaceutical composition towards a higher volume. Suitable diluents include, but are not limited to, the pharmaceutically acceptable excipient of the pharmaceutical composition and a saline solution. Furthermore, the kit may comprise instructions for diluting the pharmaceutical composition and/or instructions for administering the pharmaceutical composition, whether diluted or not. The containers may be formed from a variety of materials such as glass or plastic and may have a sterile access port (for example, the container may be an intravenous solution bag or a vial having a stopper which may be pierced by a hypodermic injection needle). The kit may further comprise more containers comprising a pharmaceutically acceptable buffer, such as phosphate-buffered saline, Ringer's solution and dextrose solution. It may further include other materials desirable from a commercial and user standpoint, including other buffers, diluents, filters, needles, syringes, culture medium for one or more of the suitable hosts. The kits may optionally include instructions customarily included in commercial packages of therapeutic or diagnostic products, that contain information about, for example, the indications, usage, dosage, manufacture, administration, contraindications and/or warnings concerning the use of such therapeutic or diagnostic products.

[0293] The kits are useful for detecting the presence of a target antigen in a biological sample, e.g., any body fluid including, but not limited to, e.g., serum, plasma, lymph, cystic fluid, urine, stool, cerebrospinal fluid, ascitic fluid or blood and including biopsy samples of body tissue. For example, the kit can comprise: one or more heterodimeric trivalent/tetravalent multispecific antibodies of the present technology capable of binding a target antigen in a biological sample; means for determining the amount of the target antigen in the sample; and means for comparing the amount of the immunoreactive target antigen in the sample with a standard. One or more of the heterodimeric trivalent/tetravalent multispecific antibodies may be labeled. The kit components, (e.g., reagents) can be packaged in a suitable container. The kit can further comprise instructions for using the kit to detect the immunoreactive target antigen.

[0294] For antibody-based kits, the kit can comprise, e.g., 1) a first antibody, e.g. a humanized, or chimeric heterodimeric trivalent/tetravalent multispecific antibody of the present technology, attached to a solid support, which binds to a target antigen; and, optionally; 2) a second, different antibody which binds to either the target antigen or to the first antibody, and is conjugated to a detectable label.

[0295] The kit can also comprise, e.g., a buffering agent, a preservative or a protein-stabilizing agent. The kit can further comprise components necessary for detecting the detectable-label, e.g., an enzyme or a substrate. The kit can also contain a control sample or a series of control samples, which can be assayed and compared to the test sample. Each component of the kit can be enclosed within an individual container and all of the various containers can be within a single package, along with instructions for interpreting the results of the assays performed using the kit. The kits of the present technology may contain a written product on or in the kit container. The written product describes how to use the reagents contained in the kit, e.g., for detection of a target antigen in vitro or in vivo, or for treatment of cancer in a subject in need thereof. In certain embodiments, the use of the reagents can be according to the methods of the present technology.

### EXAMPLES

[0296] The present technology is further illustrated by the following Examples, which should not be construed as limiting in any way.

### Example 1: Materials and Methods

[0297] Protein production. All proteins were expressed using the expi293 expression system (Thermo Fisher Scientific, Waltham Mass.) according to manufacturer's instructions. Briefly, maxiprepped plasmids containing each antibody were diluted and incubated with expifectamine for 20 min before being added to expi293s in shaker flasks. Cells were incubated for 4 days or until cell viability dropped <70%, whichever came first. IgG-based proteins were purified over a protein A column using a GE P920 AKTA FPLC and eluted using 50 mM Citric acid. The BiTE was purified using prepacked Ni²⁺NTA columns (GE) and eluted using a 250 mM imidazole buffer. All proteins were run on SEC-HPLC to validate their size and quantify their purity.

[0298] Heterodimerization. Heterodimerization was achieved using Fab Arm Exchange (FAE). Briefly, K409R and F405L mutations were placed in the Fc regions of each reciprocal pair of IgG or IgG-[L]-scFv bispecific antibodies to be heterodimerized. Paired homodimers were then mixed at 3 different molar rations (1:1, 1.2:1 and 1:1.2) and incubated in reducing conditions for 5 hrs at 30° C. before being dialyzed overnight at room temperature in sodium citrate buffer (pH 8.2). After an initial overnight dialysis, samples were moved to 4° C. for another 24 hrs before being analyzed by SEC-HPLC and CZE chromatography to assess heterodimerization yields. In all experiments the 1:1 ratio was used, after validating its purity was optimal.

[0299] Cell lines. EL.4 cells were obtained from ATCC. M14 cells were obtained from ATCC and transfected with luciferase prior to use in all assays. IMR32 cells were obtained from ATCC and transfected with luciferase prior to use in all assays. Molm13-fluc cells were a gift from the Brentjens lab. Naïve T-cells were purified from PBMCs using the Dynabeads™ Untouched™ human T cells kit, according to manufacturer's protocol. Activated T cells were generated by using CD3/CD28 dynabeads and 30U/ml of human IL-2. T-cells were stimulated twice, at day 0 and day 7, and used in cytotoxicity, cell binding or conjugate assays day 15-18 of culture.

[0300] Cell binding FACS. For cell binding assays, 1M cells were incubated with 5 pmol of antibody for 30 min at 4° C., followed by either an anti-human Fc secondary or an anti-3F8 or anti-OKT3 idiotype antibody (5 pmol) and the corresponding anti-Fc secondary (anti-rat APC or anti-mouse PE, respectively). Samples were acquired using a FACSCalibur and analyzed by FlowJo.

[0301] Affinity Measurements. Binding kinetics were evaluated using SPR (GE, Biacore T200). Briefly, chips were coated with GD2, CD33 or huCD3de antigen and a titration series of each bispecific antibody were flowed over them. Binding affinities were calculated using a two-state reaction model.

[0302] Cytotoxicity measurements. Cytotoxicity was evaluated using a 4 hr ⁵¹Cr release assay. Briefly, 1M target cells were incubated with 100 μCi of activity and incubated with activated human T cells (10:1 E:T) and serially titrated bispecific antibody. Released ⁵¹Cr was measured using a gamma counter.

[0303] Animal Models. All experiments have been conducted in accordance with and approved by the Institutional Animal Care and Use Committee in MSKCC. Two mouse models were used: (1) a humanized immunodeficient xenograft model (huDKO) and (2) a transgenic huCD3e-expressing syngeneic model (huCD3e-tg). Briefly, huDKO (Balb/C IL2rg^{-/-}, Rag2^{-/-}) mice were implanted subcutaneously with 2M M14 melanoma cells. After 5-15 days, mice were treated with intravenous activated human T cells (20-40M/dose), intravenous bispecific antibody (25 pmol/dose) and subcutaneous IL-2 (100U/dose) for three weeks. For huCD3e-tg (C57BL/6) mice were implanted subcutaneously with EL.4 lymphoma cells. After 7 days, mice were treated intravenous bispecific antibody (25 pmol/dose) for three weeks. For BiTEs, either 7 pmol or 350 pmol were administered daily for 3 weeks. Weights and tumor volumes were measured once per week and overall mouse health was evaluated at least 3-times per week. Mice were sacrificed if tumor volumes reached 1.5-2.0 cm³ volumes. No toxicities were seen during treatment of any mice.

[0304] Conjugate formation. For conjugate assays, T cells were labeled with CFSE (2.5 μM) and M14 melanoma cells were labeled with CTV (2.5 μM). 50 M/ml cells were incubated with dye for 5 min at room temperature, followed by the addition of 30 ml of complete RPMI (supplemented with 10% fetal calf serum (heat inactivated), 2 mM glutamine and 1% P/S) and incubated at 37° C. for 20 min. Cells were pelleted and washed with complete medium twice before being added antibodies or cells. Labeled cells were mixed at a 1:5 ratio (E:T) along with serially titrated bispecific antibody, in duplicate. After 30 min, cells were fixed with a final concentration of 2% PFA (10 min, RT) and washed in 5 ml of PBS. Cells were acquired using a BD LSR Fortessa and analyzed using Flowjo.

[0305] Activation assay. Purified naïve T cells were incubated with M14 melanoma cells (10:1 E:T) and serially titrated bispecific antibody, in duplicate. After 24 hrs supernatant was collected and frozen at −80° C. Cells were then stained with antibodies against CD4, CD8, CD45, and CD69 to assess the CD69 upregulation. For the 96 hr assay, T cells were first labeled with 2.504 of CTV. After 96 hrs cells were stained with antibodies against CD4, CD8, CD45 and CD25 to assess CD25 upregulation and CTV dilution.

[0306] Cytokine Assay. Frozen supernatant from the activation assay (24 hr) was used to quantify cytokine production after 24 hrs of coculture. IL-2, IFNγ, IL-10, IL-6 and TNFα were measured with the 5-plex legend plex system according to manufacturer guidelines.

[0307] FIG. 23 provides a summary of the various HDTVS antibodies tested in the Examples disclosed herein. The table summarizes all successfully produced HDTVS formatted multi-specific antibodies across a variety of antigen models. All clones were expressed in Expi293 cells and heterodimerized using the controlled Fab Arm Exchange method. HDTVS type displays the category of each clone. Fab 1 and scFv 1 (and corresponding Ag1 and Ag3) are attached in a cis-orientation on one heavy chain (linked by the light chain of Fab) while Fab 2 and scFv 2 (and corresponding Ag2 and Ag4) are on a separate heavy chain molecule in a cis-orientation (linked by the light chain of Fab).

[0308] Sequences. The amino acid sequences utilized in the Examples are provided below:

Anti-HER2
LC(VL-CL-scFv)
(SEQ ID NO: 2353)
DIQMTQSPSSLSASVGDRVTITCRASQDVNTAVAWYQQKPGKAPKLLIYS
ASFLYSGVPSRFSGSRSGTDFTLTISSLQPEDFATYYCQQHYTTPPTFGQ
GTKVEIKRTVAAPSVFIFPPSDEQLKSGTASVVCLLNNFYPREAKVQWKV
DNALQSGNSQESVTEQDSKDSTYSLSSTLTLSKADYEKHKVYACEVTHQG
LSSPVTKSFNRGECTSGGGGSGGGGSGGGGSQVQLVQSGGGVVQPGRSLR
LSCKASGYTFTRYTIVIRWVRQAPGKCLEWIGYINPSRGYTNYNQKFKDR
FTISRDNSKNTAFLQMDSLRPEDTGVYFCARYYDDHYSLDYWGQGTPVTV
SSGGGGSGGGGSGGGGSGGGGSGGGGSGGGGSDIQMTQSPSSLSASVGDR
VTITCSASSSVSYMNWYQQTPGKAPKRWIYDTSKLASGVPSRFSGSGSGT
DYTFTISSLQPEDIATYYCQQWSSNPFTFGCGTKLQITR
HC(VH-CH1-CH2-CH3, N297A, K322A):
(SEQ ID NO: 2354)
EVQLVESGGGLVQPGGSLRLSCAASGFNIKDTYIHWVRQAPGKGLEWVAR
TYPTNGYTRYADSVKGRFTISADTSKNTAYLQMNSLRAEDTAVYYCSRWG
GDGFYAMDYWGQGTLVTVSSASTKGPSVFPLAPSSKSTSGGTAALGCLVK
DYFPEPVTVSWNSGALTSGVHTFPAVLQSSGLYSLSSVVTVPSSSLGTQT
YICNVNHKPSNTKVDKRVEPKSCDKTHTCPPCPAPELLGGPSVFLFPPKP
KDTLMISRTPEVTCVVVDVSHEDPEVKFNWYVDGVEVHNAKTKPREEQYA
STYRVVSVLTVLHQDWLNGKEYKCAVSNKALPAPIEKTISKAKGQPREPQ
VYTLPPSRDELTKNQVSLTCLVKGFYPSDIAVEWESNGQPENNYKTTPPV
LDSDGSFFLYSKLTVDKSRWQQGNVFSCSVMHEALHNHYTQKSLSLSPGK
HC(VH-CH1-CH2-CH3, N297A, K322A, F405L):
(SEQ ID NO: 2355)
EVQLVESGGGLVQPGGSLRLSCAASGFNIKDTYIHWVRQAPGKGLEWVAR
TYPTNGYTRYADSVKGRFTISADTSKNTAYLQMNSLRAEDTAVYYCSRWG
GDGFYAMDYWGQGTLVTVSSASTKGPSVFPLAPSSKSTSGGTAALGCLVK
DYFPEPVTVSWNSGALTSGVHTFPAVLQSSGLYSLSSVVTVPSSSLGTQT
YICNVNHKPSNTKVDKRVEPKSCDKTHTCPPCPAPELLGGPSVFLFPPKP
KDTLMISRTPEVTCVVVDVSHEDPEVKFNWYVDGVEVHNAKTKPREEQYA
STYRVVSVLTVLHQDWLNGKEYKCAVSNKALPAPIEKTISKAKGQPREPQ
VYTLPPSRDELTKNQVSLTCLVKGFYPSDIAVEWESNGQPENNYKTTPPV
LDSDGSFLLYSKLTVDKSRWQQGNVFSCSVMHEALHNHYTQKSLSLSPGK
HC(VH-CH1-CH2-CH3, N297A, K322A, K409R):
(SEQ ID NO: 2356)
EVQLVESGGGLVQPGGSLRLSCAASGFNIKDTYIHWVRQAPGKGLEWVAR
TYPTNGYTRYADSVKGRFTISADTSKNTAYLQMNSLRAEDTAVYYCSRWG
GDGFYAMDYWGQGTLVTVSSASTKGPSVFPLAPSSKSTSGGTAALGCLVK
DYFPEPVTVSWNSGALTSGVHTFPAVLQSSGLYSLSSVVTVPSSSLGTQT
YICNVNHKPSNTKVDKRVEPKSCDKTHTCPPCPAPELLGGPSVFLFPPKP
KDTLMISRTPEVTCVVVDVSHEDPEVKFNWYVDGVEVHNAKTKPREEQYA
STYRVVSVLTVLHQDWLNGKEYKCAVSNKALPAPIEKTISKAKGQPREPQ
VYTLPPSRDELTKNQVSLTCLVKGFYPSDIAVEWESNGQPENNYKTTPPV
LDSDGSFFLYSRLTVDKSRWQQGNVFScSVMHEALHNHYTQKSLSLSPGK
Anti-GD2
LC(VL-CL-scFv):
(SEQ ID NO: 2357)
EIVMTQTPATLSVSAGERVTITCKASQSVSNDVTWYQQKPGQAPRLLIYS
ASNRYSGVPARFSGSGYGTEFTFTISSVQSEDFAVYFCQQDYSSFGQGTK
LEIKRTVAAPSVFIFPPSDEQLKSGTASVVCLLNNFYPREAKVQWKVDNA
LQSGNSQESVTEQDSKDSTYSLSSTLTLSKADYEKHKVYACEVTHQGLSS
PVTKSFNRGECTSGGGGSGGGGSGGGGSQVQLVQSGGGVVQPGRSLRLSC
KASGYTFTRYTMHWVRQAPGKCLEWIGYINPSRGYTNYNQKFKDRFTISR
DNSKNTAFLQMDSLRPEDTGVYFCARYYDDHYSLDYWGQGTPVTVSSGGG
GSGGGGSGGGGSGGGGSGGGGSGGGGSDIQMTQSPSSLSASVGDRVTITC
SASSSVSYMNWYQQTPGKAPKRWIYDTSKLASGVPSRFSGSGSGTDYTFT
ISSLQPEDIATYYCQQWSSNPFTFGCGTKLQITR
LC(VL-CL):
(SEQ ID NO: 2358)
EIVMTQTPATLSVSAGERVTITCKASQSVSNDVTWYQQKPGQAPRLLIYS
ASNRYSGVPARFSGSGYGTEFTFTISSVQSEDFAVYFCQQDYSSFGQGTK
LEIKRTVAAPSVFIFPPSDEQLKSGTASVVCLLNNFYPREAKVQWKVDNA
LQSGNSQESVTEQDSKDSTYSLSSTLTLSKADYEKHKVYACEVTHQGLSS
PVTKSFNRGEC
HC(VH-CH1-CH2-CH3, N297A, K322A):
(SEQ ID NO: 2359)
QVQLVESGPGVVQPGRSLRISCAVSGFSVTNYGVHWVRQPPGKGLEWLGV
IWAGGITNYNSAFMSRLTISKDNSKNTVYLQMNSLRAEDTAMYYCASRGG
HYGYALDYWGQGTLVTVSSASTKGPSVFPLAPSSKSTSGGTAALGCLVKD
YFPEPVTVSWNSGALTSGVHTFPAVLQSSGLYSLSSVVTVPSSSLGTQTY
ICNVNHKPSNTKVDKRVEPKSCDKTHTCPPCPAPELLGGPSVFLFPPKPK
DTLMISRTPEVTCVVVDVSHEDPEVKFNWYVDGVEVHNAKTKPREEQYAS
TYRVVSVLTVLHQDWLNGKEYKCAVSNKALPAPIEKTISKAKGQPREPQV
YTLPPSRDELTKNQVSLTCLVKGFYPSDIAVEWESNGQPENNYKTTPPVL
DSDGSFFLYSKLTVDKSRWQQGNVFScSVMHEALHNHYTQKSLSLSPGK
HC(VH-CH1-CH2-CH3, N297A, K322A, F405L):
(SEQ ID NO: 2360)
QVQLVESGPGVVQPGRSLRISCAVSGFSVTNYGVHWVRQPPGKGLEWLGV
IWAGGITNYNSAFMSRLTISKDNSKNTVYLQMNSLRAEDTAMYYCASRGG
HYGYALDYWGQGTLVTVSSASTKGPSVFPLAPSSKSTSGGTAALGCLVKD
YFPEPVTVSWNSGALTSGVHTFPAVLQSSGLYSLSSVVTVPSSSLGTQTY
ICNVNHKPSNTKVDKRVEPKSCDKTHTCPPCPAPELLGGPSVFLFPPKPK
DTLMISRTPEVTCVVVDVSHEDPEVKFNWYVDGVEVHNAKTKPREEQYAS
TYRVVSVLTVLHQDWLNGKEYKCAVSNKALPAPIEKTISKAKGQPREPQV
YTLPPSRDELTKNQVSLTCLVKGFYPSDIAVEWESNGQPENNYKTTPPVL
DSDGSFLLYSKLTVDKSRWQQGNVFSCSVMHEALHNHYTQKSLSLSPGK
HC(VH-CH1-CH2-CH3, N297A, K322A, K409R):
(SEQ ID NO: 2361)
QVQLVESGPGVVQPGRSLRISCAVSGFSVTNYGVHWVRQPPGKGLEWLGV
IWAGGITNYNSAFMSRLTISKDNSKNTVYLQMNSLRAEDTAMYYCASRGG
HYGYALDYWGQGTLVTVSSASTKGPSVFPLAPSSKSTSGGTAALGCLVKD
YFPEPVTVSWNSGALTSGVHTFPAVLQSSGLYSLSSVVTVPSSSLGTQTY
ICNVNHKPSNTKVDKRVEPKSCDKTHTCPPCPAPELLGGPSVFLFPPKPK
DTLMISRTPEVTCVVVDVSHEDPEVKFNWYVDGVEVHNAKTKPREEQYAS
TYRVVSVLTVLHQDWLNGKEYKCAVSNKALPAPIEKTISKAKGQPREPQV
YTLPPSRDELTKNQVSLTCLVKGFYPSDIAVEWESNGQPENNYKTTPPVL
DSDGSFFLYSRLTVDKSRWQQGNVFSCSVMHEALHNHYTQKSLSLSPGK
Anti-GD2(2)
LC(VL-CL-scFv):
(SEQ ID NO: 2362)
KIVMTQTPATLSVSAGERVTITCKASQSVSNHVTWYQQKPGQAPRLLIYS
ASNRYSGVPARFSGSGYGTEFTFTISSVQSEDFAVYFCQQDYSSFGQGTK
LEIKRTVAAPSVFIFPPSDEQLKSGTASVVCLLNNFYPREAKVQWKVDNA
LQSGNSQESVTEQDSKDSTYSLSSTLTLSKADYEKHKVYACEVTHQGLSS
PVTKSFNRGECTSGGGGSGGGGSGGGGSQVQLVQSGGGVVQPGRSLRLSC
KASGYTFTRYTMHWVRQAPGKCLEWIGYINPSRGYTNYNQKFKDRFTISR
DNSKNTAFLQMDSLRPEDTGVYFCARYYDDHYSLDYWGQGTPVTVSSGGG
GSGGGGSGGGGSGGGGSGGGGSGGGGSDIQMTQSPSSLSASVGDRVTITC
SASSSVSYMNWYQQTPGKAPKRWIYDTSKLASGVPSRFSGSGSGTDYTFT
ISSLQPEDIATYYCQQWSSNPFTFGCGTKLQITR
LC(VL-CL):
(SEQ ID NO: 2363)
KIVMTQTPATLSVSAGERVTITCKASQSVSNHVTWYQQKPGQAPRLLIYS
ASNRYSGVPARFSGSGYGTEFTFTISSVQSEDFAVYFCQQDYSSFGQGTK
LEIKRTVAAPSVFIFPPSDEQLKSGTASVVCLLNNFYPREAKVQWKVDNA
LQSGNSQESVTEQDSKDSTYSLSSTLTLSKADYEKHKVYACEVTHQGLSS
PVTKSFNRGEC
HC(VH-CH1-CH2-CH3, N297A, K322A):
(SEQ ID NO: 2364)
QVQLVESGPGVVQPGRSLRISCAVSGFSVTNYGVHWVRQPPGKGLEWLGV
IWAGGITNYNSAFMSRLTISKDNSKNTVYLQMNSLRAEDTAMYYCASRGG
HYGYALDYWGQGTLVTVSSASTKGPSVFPLAPSSKSTSGGTAALGCLVKD
YFPEPVTVSWNSGALTSGVHTFPAVLQSSGLYSLSSVVTVPSSSLGTQTY
ICNVNHKPSNTKVDKRVEPKSCDKTHTCPPCPAPELLGGPSVFLFPPKPK
DTLMISRTPEVTCVVVDVSHEDPEVKFNWYVDGVEVHNAKTKPREEQYAS
TYRVVSVLTVLHQDWLNGKEYKCAVSNKALPAPIEKTISKAKGQPREPQV
YTLPPSRDELTKNQVSLTCLVKGFYPSDIAVEWESNGQPENNYKTTPPVL
DSDGSFFLYSKLTVDKSRWQQGNVFSCSVMHEALHNHYTQKSLSLSPGK
HC(VH-CH1-CH2-CH3, N297A, K322A, F405L):
(SEQ ID NO: 2365)
QVQLVESGPGVVQPGRSLRISCAVSGFSVTNYGVHWVRQPPGKGLEWLGV
IWAGGITNYNSAFMSRLTISKDNSKNTVYLQMNSLRAEDTAMYYCASRGG
HYGYALDYWGQGTLVTVSSASTKGPSVFPLAPSSKSTSGGTAALGCLVKD
YFPEPVTVSWNSGALTSGVHTFPAVLQSSGLYSLSSVVTVPSSSLGTQTY
ICNVNHKPSNTKVDKRVEPKSCDKTHTCPPCPAPELLGGPSVFLFPPKPK
DTLMISRTPEVTCVVVDVSHEDPEVKFNWYVDGVEVHNAKTKPREEQYAS
TYRVVSVLTVLHQDWLNGKEYKCAVSNKALPAPIEKTISKAKGQPREPQV
YTLPPSRDELTKNQVSLTCLVKGFYPSDIAVEWESNGQPENNYKTTPPVL
DSDGSFLLYSKLTVDKSRWQQGNVFSCSVMHEALHNHYTQKSLSLSPGK
HC(VH-CH1-CH2-CH3, N297A, K322A, K409R):
(SEQ ID NO: 2366)
QVQLVESGPGVVQPGRSLRISCAVSGFSVTNYGVHWVRQPPGKGLEWLGV
IWAGGITNYNSAFMSRLTISKDNSKNTVYLQMNSLRAEDTAMYYCASRGG
HYGYALDYWGQGTLVTVSSASTKGPSVFPLAPSSKSTSGGTAALGCLVKD
YFPEPVTVSWNSGALTSGVHTFPAVLQSSGLYSLSSVVTVPSSSLGTQTY
ICNVNHKPSNTKVDKRVEPKSCDKTHTCPPCPAPELLGGPSVFLFPPKPK
DTLMISRTPEVTCVVVDVSHEDPEVKFNWYVDGVEVHNAKTKPREEQYAS
TYRVVSVLTVLHQDWLNGKEYKCAVSNKALPAPIEKTISKAKGQPREPQV
YTLPPSRDELTKNQVSLTCLVKGFYPSDIAVEWESNGQPENNYKTTPPVL
DSDGSFFLYSRLTVDKSRWQQGNVFSCSVMHEALHNHYTQKSLSLSPGK
Anti-GD2(3)
LC(VL-CL-scFv):
(SEQ ID NO: 2367)
EIVMTQSPATLSVSPGERATLSCRSSQSLVHRNGNTYLHWYLQKPGQSPK
LLIHKVSNRFSGVPDRFSGSGSGTDFTLKISRVEAEDLGVYFCSQSTHVP
PLTFGAGTKLELKRTVAAPSVFIFPPSDEQLKSGTASVVCLLNNFYPREA
KVQWKVDNALQSGNSQESVTEQDSKDSTYSLSSTLTLSKADYEKHKVYAC
EVTHQGLSSPVTKSFNRGECTSGGGGSGGGGSGGGGSQVQLVQSGGGVVQ
PGRSLRLSCKASGYTFTRYTMHWVRQAPGKCLEWIGYINPSRGYTNYNQK
FKDRFTISRDNSKNTAFLQMDSLRPEDTGVYFCARYYDDHYSLDYWGQGT
PVTVSSGGGGSGGGGSGGGGSGGGGSGGGGSGGGGSDIQMTQSPSSLSAS
VGDRVTITCSASSSVSYMNWYQQTPGKAPKRWIYDTSKLASGVPSRFSGS
GSGTDYTFTISSLQPEDIATYYCQQWSSNPFTFGCGTKLQITR
LC(VL-CL):
(SEQ ID NO: 2368)
EIVMTQSPATLSVSPGERATLSCRSSQSLVHRNGNTYLHWYLQKPGQSPK
LLIHKVSNRFSGVPDRFSGSGSGTDFTLKISRVEAEDLGVYFCSQSTHVP
PLTFGAGTKLELKRTVAAPSVFIFPPSDEQLKSGTASVVCLLNNFYPREA
KVQWKVDNALQSGNSQESVTEQDSKDSTYSLSSTLTLSKADYEKHKVYAC
EVTHQGLSSPVTKSFNRGEC
HC(VH-CH1-CH2-CH3, N297A, K322A):
(SEQ ID NO: 2369)
EVQLLQSGPELEKPGASVMISCKASGSSFTGYNMNWVRQNIGKSLEWIGA
IDPYYGGTSYNQKFKGRATLTVDKSSSTAYMHLKSLTSEDSAVYYCVSGM
EYWGQGTSVTVSSASTKGPSVFPLAPSSKSTSGGTAALGCLVKDYFPEPV
TVSWNSGALTSGVHTFPAVLQSSGLYSLSSVVTVPSSSLGTQTYICNVNH
KPSNTKVDKRVEPKSCDKTHTCPPCPAPELLGGPSVFLFPPKPKDTLMIS
RTPEVTCVVVDVSHEDPEVKFNWYVDGVEVHNAKTKPREEQYASTYRVVS
VLTVLHQDWLNGKEYKCAVSNKALPAPIEKTISKAKGQPREPQVYTLPPS
RDELTKNQVSLTCLVKGFYPSDIAVEWESNGQPENNYKTTPPVLDSDGSF
FLYSKLTVDKSRWQQGNVFSCSVMHEALHNHYTQKSLSLSPGK
HC(VH-CH1-CH2-CH3, N297A, K322A, F405L):
(SEQ ID NO: 2370)
EVQLLQSGPELEKPGASVMISCKASGSSFTGYNMNWVRQNIGKSLEWIGA
IDPYYGGTSYNQKFKGRATLTVDKSSSTAYMHLKSLTSEDSAVYYCVSGM
EYWGQGTSVTVSSASTKGPSVFPLAPSSKSTSGGTAALGCLVKDYFPEPV
TVSWNSGALTSGVHTFPAVLQSSGLYSLSSVVTVPSSSLGTQTYICNVNH
KPSNTKVDKRVEPKSCDKTHTCPPCPAPELLGGPSVFLFPPKPKDTLMIS
RTPEVTCVVVDVSHEDPEVKFNWYVDGVEVHNAKTKPREEQYASTYRVVS
VLTVLHQDWLNGKEYKCAVSNKALPAPIEKTISKAKGQPREPQVYTLPPS
RDELTKNQVSLTCLVKGFYPSDIAVEWESNGQPENNYKTTPPVLDSDGSF
LLYSKLTVDKSRWQQGNVFScSVMHEALHNHYTQKSLSLSPGK
HC(VH-CH1-CH2-CH3, N297A, K322A, K409R):
(SEQ ID NO: 2371)
EVQLLQSGPELEKPGASVMISCKASGSSFTGYNMNWVRQNIGKSLEWIGA
IDPYYGGTSYNQKFKGRATLTVDKSSSTAYMHLKSLTSEDSAVYYCVSGM
EYWGQGTSVTVSSASTKGPSVFPLAPSSKSTSGGTAALGCLVKDYFPEPV
TVSWNSGALTSGVHTFPAVLQSSGLYSLSSVVTVPSSSLGTQTYICNVNH
KPSNTKVDKRVEPKSCDKTHTCPPCPAPELLGGPSVFLFPPKPKDTLMIS
RTPEVTCVVVDVSHEDPEVKFNWYVDGVEVHNAKTKPREEQYASTYRVVS
VLTVLHQDWLNGKEYKCAVSNKALPAPIEKTISKAKGQPREPQVYTLPPS
RDELTKNQVSLTCLVKGFYPSDIAVEWESNGQPENNYKTTPPVLDSDGSF
FLYSRLTVDKSRWQQGNVFSCSVMHEALHNHYTQKSLSLSPGK
Anti-CD33
LC(VL-CL-scFv):
(SEQ ID NO: 2372)
EIVLTQSPATLSVSLGERATISCRASESVDNYGISFMNWFQQKPGQPPRL
LIYAASNQGSGVPARFSGSGPGTDFTLTISSMEPEDFAMYFCQQSKEVPW
TFGGGTKLEIKRTVAAPSVFIFPPSDEQLKSGTASVVCLLNNFYPREAKV
QWKVDNALQSGNSQESVTEQDSKDSTYSLSSTLTLSKADYEKHKVYACEV
THQGLSSPVTKSFNRGECTSGGGGSGGGGSGGGGSQVQLVQSGGGVVQPG
RSLRLSCKASGYTFTRYTMHWVRQAPGKCLEWIGYINPSRGYTNYNQKFK
DRFTISRDNSKNTAFLQMDSLRPEDTGVYFCARYYDDHYSLDYWGQGTPV
TVSSGGGGSGGGGSGGGGSGGGGSGGGGSGGGGSDIQMTQSPSSLSASVG
DRVTITCSASSSVSYMNWYQQTPGKAPKRWIYDTSKLASGVPSRFSGSGS
GTDYTFTISSLQPEDIATYYCQQWSSNPFTFGCGTKLQITR
LC(VL-CL):
(SEQ ID NO: 2373)
EIVLTQSPATLSVSLGERATISCRASESVDNYGISFMNWFQQKPGQPPRL
LIYAASNQGSGVPARFSGSGPGTDFTLTISSMEPEDFAMYFCQQSKEVPW
TFGGGTKLEIKRTVAAPSVFIFPPSDEQLKSGTASVVCLLNNFYPREAKV
QWKVDNALQSGNSQESVTEQDSKDSTYSLSSTLTLSKADYEKHKVYACEV
THQGLSSPVTKSFNRGEC
HC(VH-CH1-CH2-CH3, N297A, K322A):
(SEQ ID NO: 2374)
EVQLVQSGPEVVKPGASVKISCKASGYTFTDYNMHWVRQAHGQSLEWIGY
IYPYNGGTGYNQKFKSRATLTVDNSASTAYMEVSSLRSEDTAVYYCARGR
PAMDYWGQGTLVTVSSASTKGPSVFPLAPSSKSTSGGTAALGCLVKDYFP
EPVTVSWNSGALTSGVHTFPAVLQSSGLYSLSSVVTVPSSSLGTQTYICN
VNHKPSNTKVDKRVEPKSCDKTHTCPPCPAPELLGGPSVFLFPPKPKDTL
MISRTPEVTCVVVDVSHEDPEVKFNWYVDGVEVHNAKTKPREEQYASTYR
VVSVLTVLHQDWLNGKEYKCAVSNKALPAPIEKTISKAKGQPREPQVYTL
PPSRDELTKNQVSLTCLVKGFYPSDIAVEWESNGQPENNYKTTPPVLDSD
GSFFLYSKLTVDKSRWQQGNVFSCSVMHEALHNHYTQKSLSLSPGK
HC(VH-CH1-CH2-CH3, N297A, K322A, F405L):
(SEQ ID NO: 2375)
EVQLVQSGPEVVKPGASVKISCKASGYTFTDYNMHWVRQAHGQSLEWIGY
IYPYNGGTGYNQKFKSRATLTVDNSASTAYMEVSSLRSEDTAVYYCARGR
PAMDYWGQGTLVTVSSASTKGPSVFPLAPSSKSTSGGTAALGCLVKDYFP
EPVTVSWNSGALTSGVHTFPAVLQSSGLYSLSSVVTVPSSSLGTQTYICN
VNHKPSNTKVDKRVEPKSCDKTHTCPPCPAPELLGGPSVFLFPPKPKDTL
MISRTPEVTCVVVDVSHEDPEVKFNWYVDGVEVHNAKTKPREEQYASTYR
VVSVLTVLHQDWLNGKEYKCAVSNKALPAPIEKTISKAKGQPREPQVYTL
PPSRDELTKNQVSLTCLVKGFYPSDIAVEWESNGQPENNYKTTPPVLDSD
GSFLLYSKLTVDKSRWQQGNVFSCSVMHEALHNHYTQKSLSLSPGK
HC(VH-CH1-CH2-CH3, N297A, K322A, K409R):
(SEQ ID NO: 2376)
EVQLVQSGPEVVKPGASVKISCKASGYTFTDYNMHWVRQAHGQSLEWIGY
IYPYNGGTGYNQKFKSRATLTVDNSASTAYMEVSSLRSEDTAVYYCARGR
PAMDYWGQGTLVTVSSASTKGPSVFPLAPSSKSTSGGTAALGCLVKDYFP
EPVTVSWNSGALTSGVHTFPAVLQSSGLYSLSSVVTVPSSSLGTQTYICN
VNHKPSNTKVDKRVEPKSCDKTHTCPPCPAPELLGGPSVFLFPPKPKDTL
MISRTPEVTCVVVDVSHEDPEVKFNWYVDGVEVHNAKTKPREEQYASTYR
VVSVLTVLHQDWLNGKEYKCAVSNKALPAPIEKTISKAKGQPREPQVYTL
PPSRDELTKNQVSLTCLVKGFYPSDIAVEWESNGQPENNYKTTPPVLDSD
GSFFLYSRLTVDKSRWQQGNVFSCSVMHEALHNHYTQKSLSLSPGK
Anti-CD3
LC(VL-CL):
(SEQ ID NO: 2377)
DIQMTQSPSSLSASVGDRVTITCSASSSVSYMNWYQQTPGKAPKRWIYDT
SKLASGVPSRFSGSGSGTDYTFTISSLQPEDIATYYCQQWSSNPFTFGQG
TKLQITRTVAAPSVFIFPPSDEQLKSGTASVVCLLNNFYPREAKVQWKVD
NALQSGNSQESVTEQDSKDSTYSLSSTLTLSKADYEKHKVYACEVTHQGL
SSPVTKSFNRGEC
HC(VH-CH1-CH2-CH3, N297A, K322A):
(SEQ ID NO: 2378)
QVQLVQSGGGVVQPGRSLRLSCKASGYTFTRYTMHWVRQAPGKGLEWIGY
INPSRGYTNYNQKFKDRFTISRDNSKNTAFLQMDSLRPEDTGVYFCARYY
DDHYSLDYWGQGTPVTVSSASTKGPSVFPLAPSSKSTSGGTAALGCLVKD
YFPEPVTVSWNSGALTSGVHTFPAVLQSSGLYSLSSVVTVPSSSLGTQTY
ICNVNHKPSNTKVDKRVEPKSCDKTHTCPPCPAPELLGGPSVFLFPPKPK
DTLMISRTPEVTCVVVDVSHEDPEVKFNWYVDGVEVHNAKTKPREEQYAS
TYRVVSVLTVLHQDWLNGKEYKCAVSNKALPAPIEKTISKAKGQPREPQV
YTLPPSRDELTKNQVSLTCLVKGFYPSDIAVEWESNGQPENNYKTTPPVL
DSDGSFFLYSKLTVDKSRWQQGNVFScSVMHEALHNHYTQKSLSLSPGK
HC(VH-CH1-CH2-CH3, N297A, K322A, F405L):
(SEQ ID NO: 2379)
QVQLVQSGGGVVQPGRSLRLSCKASGYTFTRYTMHWVRQAPGKGLEWIGY
INPSRGYTNYNQKFKDRFTISRDNSKNTAFLQMDSLRPEDTGVYFCARYY
DDHYSLDYWGQGTPVTVSSASTKGPSVFPLAPSSKSTSGGTAALGCLVKD
YFPEPVTVSWNSGALTSGVHTFPAVLQSSGLYSLSSVVTVPSSSLGTQTY
ICNVNHKPSNTKVDKRVEPKSCDKTHTCPPCPAPELLGGPSVFLFPPKPK
DTLMISRTPEVTCVVVDVSHEDPEVKFNWYVDGVEVHNAKTKPREEQYAS
TYRVVSVLTVLHQDWLNGKEYKCAVSNKALPAPIEKTISKAKGQPREPQV
YTLPPSRDELTKNQVSLTCLVKGFYPSDIAVEWESNGQPENNYKTTPPVL
DSDGSFLLYSKLTVDKSRWQQGNVFSCSVMHEALHNHYTQKSLSLSPGK
HC(VH-CH1-CH2-CH3, N297A, K322A, K409R):
(SEQ ID NO: 2380)
QVQLVQSGGGVVQPGRSLRLSCKASGYTFTRYTMHWVRQAPGKGLEWIGY
INPSRGYTNYNQKFKDRFTISRDNSKNTAFLQMDSLRPEDTGVYFCARYY
DDHYSLDYWGQGTPVTVSSASTKGPSVFPLAPSSKSTSGGTAALGCLVKD
YFPEPVTVSWNSGALTSGVHTFPAVLQSSGLYSLSSVVTVPSSSLGTQTY
ICNVNHKPSNTKVDKRVEPKSCDKTHTCPPCPAPELLGGPSVFLFPPKPK
DTLMISRTPEVTCVVVDVSHEDPEVKFNWYVDGVEVHNAKTKPREEQYAS
TYRVVSVLTVLHQDWLNGKEYKCAVSNKALPAPIEKTISKAKGQPREPQV
YTLPPSRDELTKNQVSLTCLVKGFYPSDIAVEWESNGQPENNYKTTPPVL
DSDGSFFLYSRLTVDKSRWQQGNVFSCSVMHEALHNHYTQKSLSLSPGK
huOKT3-VL
(SEQ ID NO: 2390)
DIQMTQSPSSLSASVGDRVTITCSASSSVSYMNWYQQTPGKAPKRWIYDT
SKLASGVPSRFSGSGSGTDYTFTISSLQPEDIATYYCQQWSSNPFTFGCG
TKLQIT
huOKT3-VH
(SEQ ID NO: 2391)
QVQLVQSGGGVVQPGRSLRLSCKASGYTFTRYTMHWVRQAPGKCLEWIGY
INPSRGYTNYNQKFKDRFTISRDNSKNTAFLQMDSLRPEDTGVYFCARYY
DDHYSLDYWGQGTPVTVSS
huA33-VL
(SEQ ID NO: 2392)
DIQMTQSQSSLSTSVGDRVTITCKASQNVRTVVAWYQQKPGKSPKTLIYL
ASNRHTGVPSRFSGSGSGTEFTLTISNVQPEDFADYFCLQHWSYPLTFGS
GTKLEIK
huA33-VH
(SEQ ID NO: 2393)
EVQLVESGGGLVKPGGSLRLSCAASGFAFSTYDMSWVRQAPGKRLEWVAT
ISSGGSYTYYLDSVKGRFTISRDNAKNSLYLQMNSLRAEDTAVYYCAPTT
VVPFAYWGQGTLVTVSS
huM195-VL
(SEQ ID NO: 2394)
EIVLTQSPATLSVSLGERATISCRASESVDNYGISFMNWFQQKPGQPPRL
LIYAASNQGSGVPARFSGSGPGTDFTLTISSMEPEDFAMYFCQQSKEVPW
TFGGGTKLEIK
huM195-VH
(SEQ ID NO: 2395)
EVQLVQSGPEVVKPGASVKISCKASGYTFTDYNMHWVRQAHGQSLEWIGY
IYPYNGGTGYNQKFKSRATLTVDNSASTAYMEVSSLRSEDTAVYYCARGR
PAMDYWGQGTLVTVSS

### Example 2: Functionality of Lo1+1+2, Hi1+1+1 and 2+1+1 HDTVS Variants

[0309] FIG. 1a shows the basic design strategy of each HDTVS variant compared with the parental 2+2 IgG-[L]-scFv. FIGS. 1b-1g describe each of the three designs in more detail.

[0310] The Lo1+1+2 utilizes two different Fab domains that (a) target two distinct antigens within a tumor and (b) have moderate to low binding affinities (e.g. K_{D} 100 nM-100 pM), and two identical scFvs that target an immune cell so as to improve tumor cell specificity. As illustrated in FIG. 1b, this design targets tumors more specifically due to its unexpectedly poor activity when only one of the two Fab domains is engaged with the tumor target (such as when only one of the two Fab domain-specific antigens is expressed). Importantly, when both Fab domains bind their respective tumor targets, normal cytotoxic potency is restored. This allows for improved therapeutic index (or safety) when the target antigens are not unique to the tumor, where each target antigen (but never both) is shared to some extent by normal cells. While a standard BsAb or 2+2 design would harm normal tissues, this Lo1+1+2 design should spare normal tissues that express only one of the two targeted antigens, while maintaining the full potency against a tumor cell that expresses both antigens.

[0311] As illustrated in FIG. 1c, the Hi1+1+2 design is capable of recognizing two distinct antigens with equal potency, regardless of simultaneous binding. Since Fab domains of appropriately high affinity (e.g., K_{D}<100 pM) are sufficient to induce potent cytotoxicity even monovalently, two different Fab domains can be used to broaden the tumor cell selectivity and permits targeting of heterogeneous tumors with a single drug.

[0312] The 2+1+1 design is capable of improved immune cell interactions by virtue of its dual specificity toward the immune cell, either improving activation or providing more selective activation. As demonstrated herein, the second scFv domain is somewhat dispensable due to the biophysical properties of the IgG-[L]-scFv platform. Thus, using two different scFv domains can provide a greater diversity of interactions than a normal bivalent approach. As illustrated in FIG. 1d, the 2+1+1 design can be used to both improve signaling in a more selective population of immune cells (B1(+)B2(+)) or to enhance activation through colocalization of complementary pairs of receptors. Importantly, the 2+1+1 design can be used to interact with activating receptors and/or inhibitory receptors or antagonistic antibodies that specifically inhibit signaling of certain immune cell pathways, such as blocking PD-1 on T cells while activating through CD3.

[0313] The 2+1+1 design takes advantage of the two anti-immune cell binding domains to recruit a broader selection of immune cells (e.g., anti-CD3 for T cells+anti-CD16 for NK cells) or for combinatorial recruitment of payloads with immune cells as theranostics (e.g., anti-CD3 for T cells and anti-BnDOTA for imaging). As illustrated in FIG. 1e, the 2+1+1 design takes advantage of the minimal differences in therapeutic activity between a 2+1 design and a 2+2 design to add a new function, thus broadening the selection of delivered anti-tumor activity to multiple types of immune cells or to chemical or radiological payloads.

[0314] The 1+1+1+1 format combines the previous 4 designs to take advantage of all possible combinations. As shown in Figure if, this allows for the combinatorial properties of the 2+1+1 design to be combined with the specificity or selectivity improvements from the Hi1+1+2 and Lo1+1+2 designs.

### Example 3: —Superiority of 2+2 IgG-[L]-scFv Design over BITE and IgG-Het

[0315] FIG. 2a-2b show the unexpected benefits of the IgG-[L]-scFv (2+2 BsAb) over other common designs such as IgG-Het and BiTE, highlighting both the benefit of having a valency >1 and the structural properties imparted by a Fab/scFv combination. As shown in FIG. 2a, the top panels compare cytotoxicity, cell binding and antigen affinity properties between the IgG-[L]-scFv, IgG-Het and BiTE formats.

[0316] The left most panel shows that the 2+2 BsAb achieved nearly 1,000-fold improved cytotoxicity over the 1+1 IgG-Het and >20-fold than the 1+1 BiTE. Measurements were made using a standard four hour ⁵¹Cr release assay using activated human T cells and GD2(+) M14-luciferase cells, with each antibody diluted over 7-logs. The center panel shows the varying levels of antigen binding (GD2 or CD3) between these three formats using GD2(+) M14-luciferase cells or CD3(+) activated human T cells. Cells were stained with each of the three formats and detected using either anti-hu3F8 or anti-huOKT3 idiotypic antibodies. As with the cytotoxicity, the cell binding to both antigens was superior for the 2+2 BsAb due to increased valency. The right panel displays the binding kinetics against the antigen GD2 for each of the three platforms. The 2+2 BsAb exhibited stronger antigen binding over either 1+1 design (BITE or IgG-Het). The bottom panels compare these three constructs in two separate animal models: a huCD3(+) transgenic syngeneic mouse model (left panel) or a humanized immunodeficient xenograft mouse model (right panel). Both models had antibodies injected twice per week and began approximately one week after tumor implantation. Only the 2+2 BsAb was capable of delaying subcutaneous GD2(+) EL.4 tumor growth in the syngeneic model. The 1+1 IgG-Het and the 1+1 BiTE were just as ineffective as the inactive negative control BsAb. Administering the BiTE format daily or at a 10× higher dose level (“hi dose” group, syngeneic mice, FIG. 2a) did not result in any anti-tumor effect. In the xenograft model, where human ATCs and IL-2 were added to support T cell survival in all groups, the 1+1 IgG-Het still failed to show any benefit compared to the control, while the 2+2 BsAb strongly inhibited subcutaneous GD2(+) M14Luc tumors. As show in FIG. 2b, these striking differences in cytotoxicity between the IgG-[L]-scFv and IgG-Het formats were reproducible using two additional anti-GD2 antibodies, suggesting that the effects were not specific to any one GD2 epitope.

[0317] These results demonstrate that the HDTVS antibodies disclosed herein are useful in methods for treating a disease or condition, such as cancer.

### Example 4: Characterization of IgG-[L]-scFv HDTVS Variants

[0318] FIG. 3 describes the characterization of the IgG-[L]-scFv platform to identify the necessity and sufficiency of each binding domain as well as their relative impact on overall functional activity. Unexpectedly, the changes in valency did not entirely correlate with changes in functional output, suggesting a preference for tumor binding by the Fab domain over immune cell binding by the scFv domain, as well as a preference for cis-oriented domains over trans-oriented domains.

[0319] As illustrated in FIG. 3, the four IgG-[L]-scFv variants display potencies somewhere between the parental 2+2 IgG-[L]-scFv (top left) and the IgG-Het (bottom right). The 2+1 BsAb (second from left) used heterodimerization to remove one of the two immune cell binding scFv domains yet functioned quite similarly to the parental 2+2 BsAb. Neutralization of the second tumor cell binding Fab domain to create a 1+2 BsAb (third from right) reduced the potency further, but unexpectedly additional removal of an scFv domain did not significantly change the potency, as long as the two remaining domains were in a Cis orientation (1+1C, third from left). Neutralization of the second tumor cell binding Fab was achieved by replacing it with a Fab that binds CD33, an antigen not found on tumor cells or T cells. Neutralization/removal of both the tumor binding Fab domain and the T cell engaging scFv domain in a Trans orientation (1+1T, second from right) caused the biggest drop in potency (equivalent to the IgG-Het), even lower than the 1+1C despite equivalent valency. These results demonstrate that orientation or spatial arrangements of the antigen binding domains are important determinants of therapeutic potency.

[0320] These results demonstrate that the HDTVS antibodies disclosed herein are useful in methods for treating a disease or condition, such as cancer.

### Example 5: Modifications of the 2+2 IgG-[L]-scFv and Their Relative Binding Activities

[0321] FIG. 4 describes the binding activities of each IgG-[L]-scFv variant, compared to the parental 2(GD2)+2(CD3) BsAb and the IgG-Het. Monovalency towards tumor (e.g. 1+2), was created by changing one of the 2 Fab domains to an irrelevant binder (i.e., a huCD33 targeting Fab). Monovalency (e.g. 2+1) towards T cells is created by removing one of the two scFv domains. As illustrated in FIG. 4, bivalency improves antigen binding over monovalency (upper panels). Surface Plasmon Resonance was used to measure antigen binding kinetics against both GD2 coated chips (upper left) and CD3 coated chips (upper right). Briefly, each BsAb was serially titrated and flowed against each chip. Against GD2, the 2+2 BsAb and 2(GD2)+1(CD3) BsAb showed equivalent binding activities whereas the 1+1C, 1+1T, 1+2 and 1+1 IgG-Het all displayed inferior GD2 binding. Against CD3, the pattern was similar, with bivalency being superior over monovalency, but to a lesser extent (which may be attributable in part to the spatial restrictions of bivalent scFv binding compared to Fab binding). The 2+2 and 1+2 BsAb showed the strongest binding, while the 2+1, 1+1T and 1+1C exhibited inferior binding kinetics. The Fab binding domain of the IgG-Het appeared to show some benefit over a monovalent scFv, but this may result from the more stable sequence of a Fab domain compared with an scFv domain, where CH1/CL interactions are lacking. Compared to SPR, cell binding (measured as described in FIG. 2 but using a standard anti-Fc secondary antibody instead of using anti-idiotypic antibodies) showed similar results (bottom left). GD2 binding (left Y-axis) was the strongest in constructs with bivalency (2+2, 2+1), and less for constructs with monovalency (1+1T, 1+1C, 1+2 and IgG-Het). The same pattern was observed with CD3-specific cell binding (right Y-axis), with 2+2 and 1+2 binding being more effective than 2+1, 1+1T and 1+1C.

[0322] Similar to the CD3-specific SPR readings, the IgG-Het showed stronger Fab binding than scFv binding. Conjugate formation between targets and effector cells when mixed together with titrated BsAb (bottom right), showed much smaller differences between IgG-[L]-scFv variants. The 2+2 BsAb showed the most efficient conjugate formation activity, followed by the 2+1 BsAb and then all others (except control). These results demonstrate that after the removal of the second anti-effector cell scFv, all other changes to the IgG-[L]-scFv do not markedly reduce its capacity to conjugate effector target cells together, or that the small differences in cell binding activities do not impact conjugate formation or the stability of conjugate formation.

[0323] These results demonstrate that the HDTVS antibodies disclosed herein are useful in methods for treating a disease or condition, such as cancer.

### Example 6: Modifications of the 2+2 IgG-[L]-scFv and their Relative Cytotoxicity

[0324] FIG. 5 describes the anti-tumor cytotoxicity of each IgG-[L]-scFv variant in vitro, across two GD2(+) cell lines. As illustrated in FIG. 5 and summarized in TABLE 2, the variants showed a wide range of cytotoxic potency (assays were performed as described in FIG. 2).

TABLE 2

| | K_{D} | | | | Cytotoxic EC50 | |
|---|---|---|---|---|---|---|
| | | Fold | | Fold | | Fold |
| | GD2 | Change | CD3 | Change | EC50 | Change |
| 2 + 2 | 2.8 nM | — | 10 nM | — | 17 fM | — |
| 2 + 1 | 2.5 nM | 0.9 | 310 nM | 30.1 | 106 fM | 6.2 |
| 1 + 1C | 30 nM | 10.9 | 110 nM | 11.0 | 292 fM | 17.2 |
| 1 + 2 | 31 nM | 11.3 | 11 nM | 1.0 | 454 fM | 26.7 |
| 1 + 1H | 31 nM | 11.4 | 70 nM | 6.8 | 14 pM | 823.5 |
| 1 + 1T | 21 nM | 7.7 | 88 nM | 8.5 | 13 pM | 764.7 |

[0325] Against both tumor cell lines, the 2+2 BsAb displayed the highest cytotoxic effect, followed by the 2+1 and then both 1+1C and 1+2. Interestingly, the 1+1T and IgG-Het (nearly 1,000-fold worse than 2+2) were nearly identical to each other, suggesting that: the cis-oriented binding domains provide superior killing activity compared to trans-oriented binding domains, and that a 2+1 interaction is superior to a 1+2 interaction. Despite the similarities of both the trans and cis oriented 1+1 variants having identical tumor cell binding, effector cell binding capacities, antigen binding kinetics, and conjugate formation activity, the cis-trans orientations of these two constructs differ substantially in the functional output (50-fold) as measured by in vitro cytotoxicity. This unexpected observation may account for why the 1+2 fails to kill as potently as the 2+1. Without wishing to be bound by theory, it is believed that the 1+2 interaction may be caught between a cis and trans interaction at all times, while the 2+1 is more often in a cis interaction. An alternative possibility is that the tumor-binding Fab domains may be more critical for driving anti-tumor potency.

[0326] Additionally, the value of each domain and its orientation was quantified. While the 2+2 was about 1,000-fold more potent than the IgG-Het (or 1+1T), it was only 6-fold more potent than the 2+1, and 20-25 fold more potent than the 1+2 or 1+1C. These data demonstrate that the second scFv imparts about 6-fold change in activity (2+2 is 6-fold better than 2+1), the bivalent Fab imparts about 25-fold change (2+2 is up to 25-fold better than 1+2 domain) and the Cis/Trans orientation imparts another 50-fold change (1+1C is 50-fold better than 1+1T).

[0327] These results demonstrate that the HDTVS antibodies disclosed herein are useful in methods for treating a disease or condition, such as cancer.

### Example 7: Modifications of the 2+2 IgG-[L]-scFv and their Relative Immune Cell Activation

[0328] FIG. 6 describes the cell activation properties of each IgG-[L]-scFv variant in vitro. As illustrated in FIG. 6, the variations made to the IgG-[L]-scFv variants significantly influence their capacity to activate immune cells. The upper panels show upregulation of CD69 expression on T cells after 24 hours of in vitro coculture with varying concentrations of each BsAb and GD2(+) M14Luc tumor cells. As in FIG. 5, valency and cis/trans orientation appear to play an important role, suggesting that the activation potency and cytotoxicity are correlated. The 2+2 BsAb again displayed its superiority over all other variants tested, at both the level of expression level of CD69 (left) and the frequency of CD69(+) cells (right). Removal of a single domain (2+1 or 1+2) markedly lowered activation, and was made worse with the transition to 1+1C, 1+1T and finally IgG-Het. A similar pattern emerged after 96 hr of coculture (bottom panel). CD25 expression remained the highest for the 2+2, both in terms of expression level (left) and frequency of CD25(+) (center) cells. All other variants showed reduced activation of effector T cells. Proliferation was also measured using Cell Trace Violet (CTV) dilution. T cells were labeled with the cell penetrating dye CTV and incubated with target cells (M14Luc) and titrated with BsAb for 96 hrs. The frequency of cells fluorescing with less remaining CTV than an unstimulated control was considered to have divided at least once. As such, proliferation was the greatest for the 2+2 and reduced for all other IgG-[L]-scFv variants (right). No activation or proliferation was observed with any construct in the absence of tumor cells (data not shown) indicating that there is minimal activation without target antigen. These results demonstrate that a cis interaction is considerably more potent than a trans interaction (1+1C vs 1+1T) and furthermore that two cis interactions are more potent than one (2+2 vs 1+1C or 1+2 or 2+1) (two cis interactions are only possible in a dual bivalent approach, such as the 2+2 IgG-[L]-scFv).

[0329] These results demonstrate that the HDTVS antibodies disclosed herein are useful in methods for treating a disease or condition, such as cancer.

### Example 8: Modifications of the 2+2 IgG-[L]-scFv and their Relative In Vivo Tumor Clearance

[0330] FIG. 7 describes the in vivo anti-tumor activity of each IgG-[L]-scFv variant in two different tumor models. As illustrated in FIG. 7, the in vivo anti-tumor activity of each variant largely correlated with in vitro cytotoxicity. In the xenograft model (right) the strongest anti-tumor activity was imparted by the 2+2 BsAb. Surprisingly, the 2+1 was very similar, with only a slight difference in tumor recurrence (5/5 CR for both). As with the cytotoxicity data, the next most effective were the 1+1C and 1+2, validating both in vitro findings that the cis orientation is superior to the trans and the 2+1 was superior to the 1+2. All other variants (1+1T, IgG-Het, control BsAb) failed to show any effect on tumor growth. In the more aggressive syngeneic model using EL.4 tumors (as done in FIG. 1), no IgG-[L]-scFv variant aside from the 2+2 showed an anti-tumor effect. As opposed to the xenograft model where activated T-cells are directly administered to the mouse, the syngeneic model requires activation in situ, suggesting that the in vitro cell activation differences may manifest in vivo leading to diminished capacity to shrink tumors. Taken together, these results suggest that the optimal BsAb platform is capable of strong cell activation in the presence of antigen, and that bivalency toward both cell populations, target cells and effector cells, is critical. In addition, these results confirm the importance of two cis-interactions in a bispecific antibody (2+2) over all single cis-interacting variants (2+1, 1+1C, 1+2) or non-cis interacting variants (1+1T, 1+1H).

[0331] These results demonstrate that the HDTVS antibodies disclosed herein are useful in methods for treating a disease or condition, such as cancer.

### Example 9: 2+2 IgG-[L]-scFv is Superior to Other Bivalent Antibody Designs

[0332] FIG. 8 shows cytotoxicity and conjugate formation activity from 3 additional 2+2 designs, thus demonstrating the overall superiority of the IgG-[L]-scFv format. The 2+2 IgG-[L]-scFv format was more demonstrably more potent than other conventional 2+2 formats. The IgG-chemical conjugate (Yankelevich et al., Pediatr Blood Cancer 59:1198-1205 (2012)) the IgG-[H]-scFv (with scFv attached at the C-terminus of the HC instead of the LC of the IgG; Coloma & Morrison, Nat Biotechnol 15:159-163 (1997)) and the BITE-Fc, all failed to kill cells as potently in vitro, compared with the IgG-[L]-scFv design. The poor cytotoxic effects were observed despite apparently improved conjugate formation activity (bottom left) and cell binding activity (bottom right). These results demonstrate that the structural features of the IgG-[L]-scFv format (unique flexibility, orientations and arrangements of the four antigen binding domains) may be correlated with effects on T-cell recruitment, activation and cytotoxicity. FIGS. 12a-12c show the in vivo anti-tumor activity from two additional 2+2 designs, thus confirming the overall superiority of the IgG-[L]-scFv format (2+2). Using an in vivo T-cell arming model, only the IgG-[L]-scFv format (2+2) of the present technology was able to inhibit tumor growth. Strikingly, despite the dual bivalency of the dimeric BiTE-Fc and the IgG-[H]-scFv, both failed to display any anti-tumor activity compared to the control BsAb. These results confirm the in vitro findings, that the superiority of the IgG-[L]-scFv design is not strictly due to decreased distance between binding domains, but instead suggests that the potency of the IgG-[L]-scFv is not simply a function of minimization of intermembrane distance. Rather, the exceptional in vitro and in vivo potency of the IgG-[L]-scFv may be attributed at least in part to the properties of cis-configured Fab and scFv domains, spaced apart with a single Ig domain (CL), such as stiffness or flexibility.

[0333] These results demonstrate that the HDTVS antibodies disclosed herein are useful in methods for treating a disease or condition, such as cancer.

### Example 10: 2+2 IgG-[L]-scFv and Subset of Variants Against Alternative Antigens

[0334] FIG. 9 describes some of the differences in activity observed with different tumor antigens. As illustrated in FIG. 9, the IgG-[L]-scFv platform does depend in part on the tumor antigen. When targeted to CD33 (top panels) a similar pattern of cell binding and cytotoxicity was found. CD33(+) MOLM13-fluc cells were assayed as described in FIG. 4 (left). As with GD2, reduction in valency (1+1T, 1+1C, or 1+2) significantly decreased binding activity. In terms of cytotoxicity, the Cis/Trans orientation appeared to play less of a role (both 1+1T and 1+C are most inferior, and equivalent to IgG-Het), and therefore the difference between the 2+1 and 1+2 was diminished. The lack of cis/trans difference may also explain the overall worse EC₅₀ against CD33(+) MOLM-13fluc as compared to GD2(+) M14Luc or IMR32Luc. When the tumor antigen was changed to HER2 (lower panels), and the antigen binding domains possessed significantly higher binding affinity, a different pattern was observed. 2+2 and 1+2 variants appeared identical, with similar tumor binding levels despite the monovalency. This suggests that with sufficiently high affinities, the second tumor binding domain is dispensable, as predicated in the Hi1+1+2 HDTVS design.

[0335] These results demonstrate that the HDTVS antibodies disclosed herein are useful in methods for treating a disease or condition, such as cancer.

### Example 11: Hi1+1+2 and Lo1+1+2 Proof of Concept Studies

[0336] As depicted in FIG. 10a (left side), the 2(HER2)+2(CD3) functions similarly to the 1(HER2)+2(CD3), where only one Fab domain binds the tumor and the second Fab recognizes an irrelevant antigen, due to the very high affinity interaction between HER2 and the anti-HER2 Fab used (Herceptin). In both FACS binding (top) and an in vitro cytotoxicity assay (bottom) with U2OS cells, the 2(HER2)+2(CD3) and the 1(HER2)+2(CD3) were indistinguishable, highlighting the possibility of using the second Fab arm to target a separate antigen. Conversely, the Lo1(GD2)+1(GD2)+2(CD3) (right side), shows the utility of two separate tumor antigen specificities when binding affinities are sufficiently low. Here the 2(GD2)+2(CD3), the 1(GD2)+2(CD3) and Lo1(GD2)+1(GD2)+2(CD3) showed major differences that are explained by the differences in valency between constructs. In both FACS binding (top) and in vitro cytotoxicity (bottom) with U2OS cells, the 2(GD2)+2(CD3) displayed superior activity over a 1(GD2)+2(CD3) format having an irrelevant second specificity (thus limiting binding to monovalency). However, adding a second relevant Fab binding specificity (e.g. HER2) in Lo1(GD2)+1(HER2)+2(CD3) was able to rescue this defect and even improve binding and killing. These results highlight the utility of targeting two separate antigens on the same cell when the Fab affinity for each individual antigen is sufficiently low (e.g., 100 pM to 100 nM K_{D}). Additionally, the approximately 100-fold difference in EC₅₀ between the Lo1(GD2)+1(HER2)+2(CD3) and 1(GD2)+2(CD3) validates the improved therapeutic index between monovalent and bivalent binding of a Lo1(GD2)+1(HER2)+2(CD3) construct. Had the second specificity (i.e. HER2) of the Lo1+1+2(GD2) been irrelevant (no binding to tumor or T cells), it would have functioned as the 1(GD2)+2(CD3) with 100-fold less activity. This is in contrast to the 2+2 which would not be able to distinguish a dual-antigen positive tumor from a GD2(+) normal tissue (such as peripheral nerves).

[0337] As shown in FIG. 10b, when these two sets of constructs were presented to tumor cells expressing high levels of only one antigen (HER2 and GD2, left and right sides respectively), the same patterns were observed. With the 2(HER2)+2(CD3) and 1(HER2)+2(CD3), similar FACS binding and cytotoxicity were observed against the HCC1954 cell line which shows high expression of HER2(+). However, stronger binding and cytotoxicity was observed with the 2(GD2)+2(CD3) compared to the 1(GD2)+2(CD3) and a Lo1(GD2)+1(HER2)+2(CD3) having an irrelevant second specificity (second Fab domain did not recognize the tumor cell line IMR32Luc).

[0338] Taken together, with a sufficiently high effective affinity interaction a 1+2 IgG-[L]-scFv functions identically to a 2+2, suggesting the Hi1+1+2 can be used to target two separate antigens instead of just one. However, with a sufficiently low effective affinity interaction, a Lo1+1+2 can provide an improved therapeutic index to distinguish between single antigen positive normal tissue and double antigen positive tumor cells.

[0339] These results demonstrate that the HDTVS antibodies disclosed herein are useful in methods for treating a disease or condition, such as cancer.

### Example 12: Binding Affinity and Cytotoxic Selectivity of the Low Affinity 1+1+2 Format Antibodies of the Present Technology

[0340] The binding affinity of L1CAM/GD2 1+1+2 Lo, a heterodimeric 1+1+2Lo format antibody, which can bind ganglioside GD2 and adhesion protein L1CAM simultaneously, was compared with homodimeric formats against GD2 and L1CAM. Neuroblastoma cells (IMR32) were incubated with each antibody for 30 minutes at 4° C., washed and incubated with a fluorescent anti-human secondary antibody. After the final wash, the cells were analyzed using flow cytometry. As shown in FIG. 13, the binding of the low affinity 1+1+2 HDTVS antibody was stronger than that of the anti-L1CAM homodimeric antibody, but weaker than the anti-GD2 homodimeric antibody, thus showing improved targeting specificity for tumors expressing both GD2 and L1CAM.

[0341] The combined binding effect of GD2/B7H3 1+1+2 Lo, a heterodimeric 1+1+2Lo format antibody, which can bind both GD2 and B7H3 simultaneously was also compared with the homodimeric format antibodies against GD2 and B7H3, and monovalent control antibodies against GD2 or B7H3. Osteosarcoma cells (U2OS) were incubated with each antibody for 30 minutes at 4° C., washed and incubated with a fluorescent anti-human secondary antibody. After the final wash, the cells were analyzed using flow cytometry. As shown in FIG. 15, the binding of the low affinity 1+1+2 heterodimer antibody was similar to the anti-B7H3 homodimeric antibody, but weaker than the anti-GD2 homodimeric antibody. Importantly, the GD2/B7H3 1+1+2 Lo HDTVS antibody also shows improved binding over monovalent control antibodies, thus demonstrating cooperative binding of the heterodimeric GD2/B7H3 1+1+2 Lo antibody.

[0342] To assess the cytotoxic selectivity of the low affinity 1+1+2Lo format antibodies of the present technology, HER2/GD2 1+1+2 Lo, a heterodimeric 1+1+2Lo format antibody, which can bind both GD2 and HER2 simultaneously, was studied. In this format, a low affinity HER2 sequence was used. Homodimeric formats against GD2 and HER2, and monovalent control antibodies against GD2 or HER2 were included for reference. Osteosarcoma cells (U2OS) were first incubated with ⁵¹Cr for one hour. After the incubation, the ⁵¹Cr labeled target cells were mixed with serial dilutions of the antibodies and activated human T-cells for four hours at 37° C. After four hours, supernatant was harvested and analyzed on a gamma counter to quantify the released ⁵¹Cr. As shown in FIG. 16, the low affinity 1+1+2 heterodimer antibody killed U2OS cells as effectively as the anti-GD2 and anti-HER2 homodimeric antibodies and showed clear superiority over the monovalent control formats. Therefore, the 1+1+2Lo design exhibited 10-100-fold lower cytotoxic potency in cells expressing each individual antigen compared to target cells expressing both antigens simultaneously. A homodimeric design for either GD2 or HER2 would not be expected to exhibit such selectivity.

[0343] These results demonstrate the selective cytotoxicity could be attained with the 1+1+2Lo design by targeting cells expressing each individual antigen with 10-100-fold lower cytotoxic potency than targets expressing both antigens simultaneously.

[0344] Accordingly, the 1+1+2Lo format antibodies of the present technology are useful in methods for treating a disease or condition, such as cancer.

### Example 13: Binding Affinity and Cytotoxic Dual Specificity of the 1+1+2Hi Format Antibodies of the Present Technology

[0345] To assess the binding affinity of the heterodimeric 1+1+2Hi format antibodies of the present technology, the combined binding effect of HER2/EGFR 1+1+2Hi, a heterodimeric 1+1+2Hi format antibody, which can bind both HER2 and EGFR, either simultaneously or separately, was analyzed. Homodimeric formats against HER2 and EGFR were included for reference. Desmoplastic Small Cell Round Tumor cells (JN-DSRCT1) were incubated with each antibody for 30 minutes at 4° C., washed and incubated with a fluorescent anti-human secondary antibody. As shown in FIG. 14, the binding of the high affinity 1+1+2 heterodimer antibody was stronger than that of either anti-HER2 or anti-EGFR homodimeric antibodies, while maintaining specificity for both antigens, thus demonstrating cooperative binding.

[0346] HER2/GPA33 1+1+2 Hi, a heterodimeric 1+1+2Hi format antibody, which can bind both GPA33 and HER2 either simultaneously or separately, was compared with the homodimeric format antibodies against GPA33 and HER2, and monovalent control antibodies against GPA33 or HER2. To compare the combined binding effect, colon cancer cells (Colo205) were incubated with each antibody for 30 minutes at 4° C., washed and incubated with a fluorescent anti-human secondary antibody. After the final wash, the cells were analyzed using flow cytometry. HER2/GPA33 1+1+2 Hi antibody bound both HER2 and GPA33 on Colo205 cells, either simultaneously or separately (FIG. 17b). As shown in FIG. 17b, the binding affinity of the 1+1+2Hi heterodimer antibody was stronger than either anti-HER2 or anti-GPA33 homodimeric and monovalent control antibodies, while maintaining specificity for both antigens, thus demonstrating cooperative binding.

[0347] To evaluate the cytotoxic specificity of the HER2/GPA33 1+1+2Hi format antibody, colon cancer cells (Colo205) were first incubated with ⁵¹Cr for one hour. After the incubation, the ⁵¹Cr labeled target cells were mixed with serial dilutions of the indicated antibody and activated human T-cells for four hours at 37° C. After four hours, the supernatant was harvested and read on a gamma counter to quantify the released ⁵¹Cr. Cytotoxicity was measured as the % of released ⁵¹Cr from maximum release. As shown in FIG. 17a, the high affinity 1+1+2 heterodimer antibody killed Colo205 cells as effectively as the anti-GPA33 homodimeric antibody, but with greater potency than the anti-HER2 homodimeric antibody and monovalent control antibodies. These results demonstrate functional cooperativity between the HER2 and GPA33 antigen binding domains, and illustrate that the dual specificity of a 1+1+2Hi format does not significantly compromise its cytotoxicity against either antigen individually.

[0348] Accordingly, the 1+1+2Hi format antibodies of the present technology are useful in methods for treating a disease or condition, such as cancer.

### Example 14: Combined Binding Effects and Cytokine Release Induced by the 2+1+1 Format Antibodies of the Present Technology

[0349] To evaluate the combined binding effects of the heterodimeric 2+1+1 format antibodies of the present technology, several heterodimeric 2+1+1 format antibodies were compared with their corresponding homodimeric format antibodies and monovalent control antibodies. For example, CD3/CD4 2+1+1, a heterodimeric 2+1+1 format antibody that can bind both CD3 and CD4 simultaneously was compared with its corresponding bivalent format antibodies against CD3 and CD4, and a monomeric CD3 binder (2+1). For this binding assay, active human T cells were incubated with each antibody for 30 minutes at 4° C., washed and incubated with a fluorescent anti-human secondary antibody. After the final wash, the cells were analyzed using flow cytometry. As shown in FIG. 19, the binding of CD3/CD4 2+1+1 antibodies showed enhanced binding compared to the bivalent CD4 antibody and monomeric CD3 binder (2+1), thus demonstrating cooperative binding.

[0350] Similarly, binding of CD3/PD-1 2+1+1, a heterodimeric 2+1+1 format antibody that can bind both CD3 and PD-1 simultaneously, was compared with homodimeric anti-PD-1 and anti-CD3 antibodies, and with an anti-CD3 monomeric (2+1) binder. For this binding assay active human T cells were incubated with each antibody for 30 minutes at 4° C., washed and incubated with a fluorescent anti-human secondary antibody. After the final wash, the cells were analyzed using flow cytometry. As shown in FIG. 20, the 2+1+1 heterodimer antibody bound cells better than either anti-PD-1 homodimeric antibody or anti-CD3 monomeric (2+1) binder, thus demonstrating cooperative binding. Collectively, these data demonstrate that a heterodimeric 2+1+1 format antibody of the present technology binds its target better than the corresponding weaker-binding homodimeric antibody and its corresponding monomeric (2+1) binder, thus demonstrating cooperative binding.

[0351] Next, cytokine release induced by CD3/CD28 2+1+1, a heterodimeric 2+1+1 format antibody, was analyzed. The homodimeric format antibodies against CD3 and CD28 were included for reference. Naïve human T-cells and melanoma tumor cells (M14) were co-cultured along with the indicated BsAb for 20 hours. Culture supernatants were harvested following the incubation and analyzed for secreted cytokine IL-2 by FACS. Data were normalized to T-cell cytokine release after 20 hours without target cells or antibody. As shown in FIG. 18, the CD3/CD28 2+1+1 antibody showed more potent cytokine release activity compared to either CD3 or CD28 engagement alone, illustrating cooperative activity from dual CD3/CD28 engagement. These results demonstrate the utility of a heterodimeric 2+1+1 design that can bind both CD3 and CD28 on T-cells.

[0352] Accordingly, the 2+1+1 format antibodies of the present technology are useful in methods for treating a disease or condition, such as cancer.

### Example 15: Comparison of the IgG-L-scFv Format of the Present Technology with BiTE-Fc and IgG-H-scFv Formats

[0353] The IgG-L-scFv design was next compared with two other common dual bivalent design strategies: the BiTE-Fc and the IgG-H-scFv formats. First, to compare cytokine release induced by IgG-L-scFv design compared to BiTE-Fc and the IgG-H-scFv, naïve T-cells and melanoma tumor cells (M14) were co-cultured along with each BsAb for 20 hours. Culture supernatants were harvested and analyzed for secreted cytokine IL-2. Data were normalized to T-cell cytokine release after 20 hours without target cells or antibody. As shown in FIG. 21a, the IgG-L-scFv design (2+2) exhibited unusually potent T-cell functional activity compared to other dual bivalent T-cell bispecific antibody formats.

[0354] To compare binding intensity, T-cells and melanoma tumor cells (M14) were separately incubated with each antibody for 30 minutes at 4° C., washed and incubated with a fluorescent anti-human secondary antibody. After the final wash, the cells were analyzed using flow cytometry. As shown in FIG. 21b (upper panel), IgG-L-scFv design showed unusually weak T-cell binding activity compared to other dual bivalent T-cell bispecific antibody formats. In contrast to their GD2 binding activity (FIG. 21b (middle panel)), each BsAb demonstrated quite different T-cell binding activities. These data demonstrated how the IgG-L-scFv design is uniquely different than other dual-bivalent designs, with each scFv showing incomplete bivalent binding. Although the inclusion of two scFv domains in the IgG-L-scFv did result in an improvement over monovalent designs, it still did not compare to the binding activity of the 2+2 IgG-H-scFv or 2+2 BiTE-Fc designs, illustrating the sterically hindered binding of this format.

[0355] The effect of the observed binding and cytokine release profiles on the in vivo antitumor activity was explored next. Immunodeficient mice (Balb/c IL-2Rgc−/−, Rag2−/−) were implanted with neuroblastoma cells (IMR32) subcutaneously and treated with intravenous activated T-cells and antibody (2-times per week). Tumors sizes were measured by caliper. As shown in FIG. 21c, the IgG-L-scFv design antibodies inhibited tumor growth. In comparison, the IgG-H-scFv and BiTE-Fc design antibodies showed a borderline in vivo effect. Therefore, in contrast to the IgG-H-scFv (2+2HC) and the BiTE-Fc (2+2B) designs, the IgG-L-scFv format (2+2) demonstrated significant cytokine IL-2 responses in vitro (FIG. 21a), which correlated with stronger in vivo activity (FIG. 21c).

[0356] Collectively, these data demonstrate the in vivo superiority of the IgG-L-scFv format antibodies in that only the IgG-L-scFv format antibodies were capable of inhibiting tumor growth in animals in contrast to other dual bivalent designs.

[0357] These results demonstrate that the HDTVS antibodies disclosed herein are useful in methods for treating a disease or condition, such as cancer.

### Example 16: Importance of Cis-Oriented Binding Domains with Respect to In Vitro Properties of an Anti-IgG-[L]-scFv Antibody

[0358] To further understand the in vitro properties of antibodies of various designs, a anti-CD33 IgG-[L]-scFv panel was created, and the in vitro cytotoxicity EC₅₀, fold-difference in EC₅₀, antigen valency, heterodimer design and protein purity were examined. FIG. 22 summarizes the data. Fold change was based on the EC₅₀ of 2+2. Purity was calculated as the fraction of protein at correct elution time out of the total protein by area under the curve of the SEC-HPLC chromatogram. For the cytotoxicity assays, CD33-transfected cells (Nalm6) were first incubated with ⁵¹Cr for one hour. Afterwards, ⁵¹Cr labeled target cells were mixed with serial titrations of the indicated antibody and activated human T-cells for four hours at 37° C. The supernatant was harvested and analyzed on a gamma counter to quantify the released ⁵¹Cr. Cytotoxicity was measured as the % of released ⁵¹Cr from maximum release. These results shown in FIG. 22 confirm the relative importance of cis-oriented binding domains in an additional antigen system (CD33) which is much more membrane distal than GD2 (see FIG. 5).

[0359] These results demonstrate that the HDTVS antibodies disclosed herein are useful in methods for treating a disease or condition, such as cancer.

### EQUIVALENTS

[0360] The present technology is not to be limited in terms of the particular embodiments described in this application, which are intended as single illustrations of individual aspects of the present technology. Many modifications and variations of this present technology can be made without departing from its spirit and scope, as will be apparent to those skilled in the art. Functionally equivalent methods and apparatuses within the scope of the present technology, in addition to those enumerated herein, will be apparent to those skilled in the art from the foregoing descriptions. Such modifications and variations are intended to fall within the scope of the present technology. It is to be understood that this present technology is not limited to particular methods, reagents, compounds compositions or biological systems, which can, of course, vary. It is also to be understood that the terminology used herein is for the purpose of describing particular embodiments only, and is not intended to be limiting.

[0361] In addition, where features or aspects of the disclosure are described in terms of Markush groups, those skilled in the art will recognize that the disclosure is also thereby described in terms of any individual member or subgroup of members of the Markush group.

[0362] As will be understood by one skilled in the art, for any and all purposes, particularly in terms of providing a written description, all ranges disclosed herein also encompass any and all possible subranges and combinations of subranges thereof. Any listed range can be easily recognized as sufficiently describing and enabling the same range being broken down into at least equal halves, thirds, quarters, fifths, tenths, etc. As a non-limiting example, each range discussed herein can be readily broken down into a lower third, middle third and upper third, etc. As will also be understood by one skilled in the art all language such as “up to,” “at least,” “greater than,” “less than,” and the like, include the number recited and refer to ranges which can be subsequently broken down into subranges as discussed above. Finally, as will be understood by one skilled in the art, a range includes each individual member. Thus, for example, a group having 1-3 cells refers to groups having 1, 2, or 3 cells. Similarly, a group having 1-5 cells refers to groups having 1, 2, 3, 4, or 5 cells, and so forth.

[0363] All patents, patent applications, provisional applications, and publications referred to or cited herein are incorporated by reference in their entirety, including all figures and tables, to the extent they are not inconsistent with the explicit teachings of this specification.

The application's sequence listing, which the Patent Office published only in electronic form, follows.

SEQUENCE LISTING (2510 sequences)

SEQ ID NO: 1 - protein, 107 aa, Artificial Sequence
  Description of Artificial Sequence: Synthetic polypeptide
DILMTQSPSSMSVSLGDTVSITCHASQGISSNIGWLQQKPGKSFMGLIYYGTNLVDGVPSRFSGSGSGADYSLTISSLDSEDFADYYCVQYAQLPYTFGGGTKLEIK

SEQ ID NO: 2 - protein, 6 aa, Artificial Sequence
  Description of Artificial Sequence: Synthetic peptide
QGISSN

SEQ ID NO: 3 - protein, 3 aa, Artificial Sequence
  Description of Artificial Sequence: Synthetic peptide
YGT

SEQ ID NO: 4 - protein, 9 aa, Artificial Sequence
  Description of Artificial Sequence: Synthetic peptide
VQYAQLPYT

SEQ ID NO: 5 - protein, 119 aa, Artificial Sequence
  Description of Artificial Sequence: Synthetic polypeptide
EVQLQQSGAELVKPGASVKLSCTASGFNIKDTYVHWVKQRPEQGLEWIGRIDPANGYTKYDPKFQGKATITADTSSNTAYLQLSSLTSEDTAVYYCVRPLYDYYAMDYWGQGTSVTVSS

SEQ ID NO: 6 - protein, 8 aa, Artificial Sequence
  Description of Artificial Sequence: Synthetic peptide
GFNIKDTY

SEQ ID NO: 7 - protein, 8 aa, Artificial Sequence
  Description of Artificial Sequence: Synthetic peptide
IDPANGYT

SEQ ID NO: 8 - protein, 12 aa, Artificial Sequence
  Description of Artificial Sequence: Synthetic peptide
VRPLYDYYAMDY

SEQ ID NO: 9 - protein, 107 aa, Artificial Sequence
  Description of Artificial Sequence: Synthetic polypeptide
DIQMTQTPSTLSASVGDRVTISCRASQDINNYLNWYQQKPGKAPKLLIYYTSTLHSGVPSRFSGSGSGTDYTLTISSLQPDDFATYFCQQGNTLPWTFGQGTKVEVK

SEQ ID NO: 10 - protein, 6 aa, Artificial Sequence
  Description of Artificial Sequence: Synthetic peptide
QDINNY

SEQ ID NO: 11 - protein, 3 aa, Artificial Sequence
  Description of Artificial Sequence: Synthetic peptide
YTS

SEQ ID NO: 12 - protein, 9 aa, Artificial Sequence
  Description of Artificial Sequence: Synthetic peptide
QQGNTLPWT

SEQ ID NO: 13 - protein, 119 aa, Artificial Sequence
  Description of Artificial Sequence: Synthetic polypeptide
QVQLVQSGAEVKKPGSSVKVSCKASGYAFTNYLIEWVRQAPGQGLEWIGVIYPGSGGTNYNEKFKGRVTLTVDESTNTAYMELSSLRSEDTAVYFCARRDGNYGWFAYWGQGTLVTVSS

SEQ ID NO: 14 - protein, 8 aa, Artificial Sequence
  Description of Artificial Sequence: Synthetic peptide
GYAFTNYL

SEQ ID NO: 15 - protein, 8 aa, Artificial Sequence
  Description of Artificial Sequence: Synthetic peptide
IYPGSGGT

SEQ ID NO: 16 - protein, 12 aa, Artificial Sequence
  Description of Artificial Sequence: Synthetic peptide
ARRDGNYGWFAY

SEQ ID NO: 17 - protein, 106 aa, Artificial Sequence [sequence omitted]

SEQ ID NO: 18 - protein, 6 aa, Artificial Sequence
  Description of Artificial Sequence: Synthetic peptide
QDINKY

SEQ ID NO: 19 - protein, 3 aa, Artificial Sequence
  Description of Artificial Sequence: Synthetic peptide
YTS

SEQ ID NO: 20 - protein, 8 aa, Artificial Sequence
  Description of Artificial Sequence: Synthetic peptide
LQYDNLWT

SEQ ID NO: 21 - protein, 123 aa, Artificial Sequence [sequence omitted]

SEQ ID NO: 22 - protein, 8 aa, Artificial Sequence
  Description of Artificial Sequence: Synthetic peptide
GFNIKDTY

SEQ ID NO: 23 - protein, 8 aa, Artificial Sequence
  Description of Artificial Sequence: Synthetic peptide
IDPANGYT

SEQ ID NO: 24 - protein, 16 aa, Artificial Sequence
  Description of Artificial Sequence: Synthetic peptide
AREGYYGNYGVYAMDY

SEQ ID NO: 25 - protein, 112 aa, Artificial Sequence [sequence omitted]

SEQ ID NO: 26 - protein, 11 aa, Artificial Sequence
  Description of Artificial Sequence: Synthetic peptide
QSLAKSYGNTY

SEQ ID NO: 27 - protein, 3 aa, Artificial Sequence
  Description of Artificial Sequence: Synthetic peptide
GIS

SEQ ID NO: 28 - protein, 9 aa, Artificial Sequence
  Description of Artificial Sequence: Synthetic peptide
LQGTHQPYT

SEQ ID NO: 29 - protein, 121 aa, Artificial Sequence [sequence omitted]

SEQ ID NO: 30 - protein, 8 aa, Artificial Sequence
  Description of Artificial Sequence: Synthetic peptide
GYTFTSYW

SEQ ID NO: 31 - protein, 8 aa, Artificial Sequence
  Description of Artificial Sequence: Synthetic peptide
IDPSESNT

SEQ ID NO: 32 - protein, 14 aa, Artificial Sequence
  Description of Artificial Sequence: Synthetic peptide
ARGGYDGWDYAIDY

SEQ ID NO: 33 - protein, 107 aa, Artificial Sequence [sequence omitted]

SEQ ID NO: 34 - protein, 6 aa, Artificial Sequence
  Description of Artificial Sequence: Synthetic peptide
ESVDDL

SEQ ID NO: 35 - protein, 4 aa, Artificial Sequence
  Description of Artificial Sequence: Synthetic peptide
YASQ

SEQ ID NO: 36 - protein, 9 aa, Artificial Sequence
  Description of Artificial Sequence: Synthetic peptide
QQGNSLPNT

SEQ ID NO: 37 - protein, 117 aa, Artificial Sequence [sequence omitted]

SEQ ID NO: 38 - protein, 8 aa, Artificial Sequence
  Description of Artificial Sequence: Synthetic peptide
GFFITNNY

SEQ ID NO: 39 - protein, 7 aa, Artificial Sequence
  Description of Artificial Sequence: Synthetic peptide
ISYSGST

SEQ ID NO: 40 - protein, 11 aa, Artificial Sequence
  Description of Artificial Sequence: Synthetic peptide
ARTGSSGYFDF

SEQ ID NO: 41 - protein, 108 aa, Artificial Sequence
  Description of Artificial Sequence: Synthetic polypeptide
EIVLTQSPATLSLSPGERATLSCRASQSVSSYLAWYQQKPGQAPRLLIYDASNRATGIPARFSGSGSGTDFTLTISSLEPEDFAVYYCQQRSNWPPFTFGPGTKVDIK

SEQ ID NO: 42 - protein, 6 aa, Artificial Sequence
  Description of Artificial Sequence: Synthetic peptide
QSVSSY

SEQ ID NO: 43 - protein, 3 aa, Artificial Sequence
  Description of Artificial Sequence: Synthetic peptide
DAS

SEQ ID NO: 44 - protein, 10 aa, Artificial Sequence
  Description of Artificial Sequence: Synthetic peptide
QQRSNWPPFT

SEQ ID NO: 45 - protein, 119 aa, Artificial Sequence
  Description of Artificial Sequence: Synthetic polypeptide
QVQLVESGGGVVQPGRSRRLSCAASGFTFSRYTMHWVRQAPGKGLEWVAVISFDGSNKYYVDSVKGRFTISRDNSENTLYLQVNILRAEDTAVYYCAREARGSYAFDIWGQGTMVTVSS

SEQ ID NO: 46 - protein, 8 aa, Artificial Sequence
  Description of Artificial Sequence: Synthetic peptide
GFTFSRYT

SEQ ID NO: 47 - protein, 8 aa, Artificial Sequence
  Description of Artificial Sequence: Synthetic peptide
ISFDGSNK

SEQ ID NO: 48 - protein, 12 aa, Artificial Sequence
  Description of Artificial Sequence: Synthetic peptide
AREARGSYAFDI

SEQ ID NO: 49 - protein, 111 aa, Artificial Sequence [sequence omitted]

SEQ ID NO: 50 - protein, 9 aa, Artificial Sequence
  Description of Artificial Sequence: Synthetic peptide
SSDVGSYNY

SEQ ID NO: 51 - protein, 3 aa, Artificial Sequence
  Description of Artificial Sequence: Synthetic peptide
GVS

SEQ ID NO: 52 - protein, 11 aa, Artificial Sequence
  Description of Artificial Sequence: Synthetic peptide
GTFAGGSYYGV

SEQ ID NO: 53 - protein, 115 aa, Artificial Sequence [sequence omitted]

SEQ ID NO: 54 - protein, 8 aa, Artificial Sequence
  Description of Artificial Sequence: Synthetic peptide
GYTFTSSY

SEQ ID NO: 55 - protein, 8 aa, Artificial Sequence
  Description of Artificial Sequence: Synthetic peptide
INPVSGST

SEQ ID NO: 56 - protein, 8 aa, Artificial Sequence
  Description of Artificial Sequence: Synthetic peptide
ARGGWFDY

SEQ ID NO: 57 - protein, 108 aa, Artificial Sequence
  Description of Artificial Sequence: Synthetic polypeptide
EIVLTQSPGTLSLSPGERATLSCRASQSVSSSYLAWYQQKPGQAPRLLIYGTSSRATGIPDRFSGSGSGTDFTLTISRLEPEDFAVYYCQQYGSSPITFGQGTRLEIK

SEQ ID NO: 58 - protein, 7 aa, Artificial Sequence
  Description of Artificial Sequence: Synthetic peptide
QSVSSSY

SEQ ID NO: 59 - protein, 3 aa, Artificial Sequence
  Description of Artificial Sequence: Synthetic peptide
GTS

SEQ ID NO: 60 - protein, 9 aa, Artificial Sequence
  Description of Artificial Sequence: Synthetic peptide
QQYGSSPIT

SEQ ID NO: 61 - protein, 118 aa, Artificial Sequence
  Description of Artificial Sequence: Synthetic polypeptide
QVQLQESGPGLVKPSQTLSLTCTVSGGSISSGEYYWNWIRQHPGKGLEWIGYIYYSGSTYYNPSLKSRVTISVDTSKNQFSLKLSSVTAADTAVYYCARESVAGFDYWGQGTLVTVSS

SEQ ID NO: 62 - protein, 10 aa, Artificial Sequence
  Description of Artificial Sequence: Synthetic peptide
GGSISSGEYY

SEQ ID NO: 63 - protein, 7 aa, Artificial Sequence
  Description of Artificial Sequence: Synthetic peptide
IYYSGST

SEQ ID NO: 64 - protein, 10 aa, Artificial Sequence
  Description of Artificial Sequence: Synthetic peptide
ARESVAGFDY

SEQ ID NO: 65 - protein, 113 aa, Artificial Sequence
  Description of Artificial Sequence: Synthetic polypeptide
DIQMTQSPSSLSASVGDRVTITCKSIQTLLYSSNQKNYLAWFQQKPGKAPKLLIYWASIRKSGVPSRFSGSGSGTDFTLTISSLQPEDLATYYCQQYYSYPLTFGGGTKLEIK

SEQ ID NO: 66 - protein, 12 aa, Artificial Sequence
  Description of Artificial Sequence: Synthetic peptide
QTLLYSSNQKNY

SEQ ID NO: 67 - protein, 3 aa, Artificial Sequence
  Description of Artificial Sequence: Synthetic peptide
WAS

SEQ ID NO: 68 - protein, 9 aa, Artificial Sequence
  Description of Artificial Sequence: Synthetic peptide
QQYYSYPLT

SEQ ID NO: 69 - protein, 116 aa, Artificial Sequence
  Description of Artificial Sequence: Synthetic polypeptide
EVQLVESGGGLVQPGGSLRLSCAASGFTFSNYGMSWVRQAPGKGLEWVASISSGGGSTYYPDNVKGRFTISRDDAKNSLYLQMNSLRAEDTAVYYCARGGAGIDYWGQGTLVTVSS

SEQ ID NO: 70 - protein, 8 aa, Artificial Sequence
  Description of Artificial Sequence: Synthetic peptide
GFTFSNYG

SEQ ID NO: 71 - protein, 8 aa, Artificial Sequence
  Description of Artificial Sequence: Synthetic peptide
ISSGGGST

SEQ ID NO: 72 - protein, 10 aa, Artificial Sequence
  Description of Artificial Sequence: Synthetic peptide
ARGGAGIDYW

SEQ ID NO: 73 - protein, 112 aa, Artificial Sequence [sequence omitted]

SEQ ID NO: 74 - protein, 11 aa, Artificial Sequence
  Description of Artificial Sequence: Synthetic peptide
QSLLDSDGKTY

SEQ ID NO: 75 - protein, 3 aa, Artificial Sequence
  Description of Artificial Sequence: Synthetic peptide
LVS

SEQ ID NO: 76 - protein, 9 aa, Artificial Sequence
  Description of Artificial Sequence: Synthetic peptide
WQGTHFPRT

SEQ ID NO: 77 - protein, 119 aa, Artificial Sequence [sequence omitted]

SEQ ID NO: 78 - protein, 8 aa, Artificial Sequence
  Description of Artificial Sequence: Synthetic peptide
GFTFSNYG

SEQ ID NO: 79 - protein, 8 aa, Artificial Sequence
  Description of Artificial Sequence: Synthetic peptide
IRSGGGRT

SEQ ID NO: 80 - protein, 12 aa, Artificial Sequence
  Description of Artificial Sequence: Synthetic peptide
VRYDHYSGSSDY

SEQ ID NO: 81 - protein, 112 aa, Artificial Sequence
  Description of Artificial Sequence: Synthetic polypeptide
DVVMTQSPLSLPVTLGQPASISCRSSQSLIYSDGNAYLHWFLQKPGQSPRLLIYKVSNRFSGVPDRFSGSGSGTDFTLKISRVEAEDVGVYYCSQSTHVPWTFGQGTKVEIK

SEQ ID NO: 82 - protein, 11 aa, Artificial Sequence
  Description of Artificial Sequence: Synthetic peptide
QSLIYSDGNAY

SEQ ID NO: 83 - protein, 3 aa, Artificial Sequence
  Description of Artificial Sequence: Synthetic peptide
KVS

SEQ ID NO: 84 - protein, 9 aa, Artificial Sequence
  Description of Artificial Sequence: Synthetic peptide
SQSTHVPWT

SEQ ID NO: 85 - protein, 112 aa, Artificial Sequence
  Description of Artificial Sequence: Synthetic polypeptide
EVQLVESGGGLVQPGGSLRLSCAASGFTFSRYSMSWVRQAPGKGLELVAQINSVGNSTYYPDTVKGRFTISRDNAKNTLYLQMNSLRAEDTAVYYCASGDYWGQGTLVTVSS

SEQ ID NO: 86 - protein, 8 aa, Artificial Sequence
  Description of Artificial Sequence: Synthetic peptide
GFTFSRYS

SEQ ID NO: 87 - protein, 8 aa, Artificial Sequence
  Description of Artificial Sequence: Synthetic peptide
INSVGNST

SEQ ID NO: 88 - protein, 5 aa, Artificial Sequence
  Description of Artificial Sequence: Synthetic peptide
ASGDY

SEQ ID NO: 89 - protein, 112 aa, Artificial Sequence
  Description of Artificial Sequence: Synthetic polypeptide
DIVMTQSPLSLPVTPGEPASISCRSSQSLVYSNGDTYLHWYLQKPGQSPQLLIYKVSNRFSGVPDRFSGSGSGTDFTLKISRVEAEDVGVYYCSQSTHVPWTFGQGTKVEIK

SEQ ID NO: 90 - protein, 11 aa, Artificial Sequence
  Description of Artificial Sequence: Synthetic peptide
QSLVYSNGDTY

SEQ ID NO: 91 - protein, 3 aa, Artificial Sequence
  Description of Artificial Sequence: Synthetic peptide
KVS

SEQ ID NO: 92 - protein, 9 aa, Artificial Sequence
  Description of Artificial Sequence: Synthetic peptide
SQSTHVPWT

SEQ ID NO: 93 - protein, 112 aa, Artificial Sequence
  Description of Artificial Sequence: Synthetic polypeptide
EVQLVESGGGLVQPGGSLRLSCAASGFTFSSYGMSWVRQAPGKGLELVASINSNGGSTYYPDSVKGRFTISRDNAKNSLYLQMNSLRAEDTAVYYCASGDYWGQGTTVTVSS

SEQ ID NO: 94 - protein, 8 aa, Artificial Sequence
  Description of Artificial Sequence: Synthetic peptide
GFTFSSYG

SEQ ID NO: 95 - protein, 8 aa, Artificial Sequence
  Description of Artificial Sequence: Synthetic peptide
INSNGGST

SEQ ID NO: 96 - protein, 6 aa, Artificial Sequence
  Description of Artificial Sequence: Synthetic peptide
ASGDYW

SEQ ID NO: 97 - protein, 112 aa, Artificial Sequence
  Description of Artificial Sequence: Synthetic polypeptide
DVVMTQSPLSLPVTLGQPASISCKSSQSLLYSDAKTYLNWFQQRPGQSPRRLIYQISRLDPGVPDRFSGSGSGTDFTLKISRVEAEDVGVYYCLQGTHYPVLFGQGTRLEIK

SEQ ID NO: 98 - protein, 11 aa, Artificial Sequence
  Description of Artificial Sequence: Synthetic peptide
QSLLYSDAKTY

SEQ ID NO: 99 - protein, 3 aa, Artificial Sequence
  Description of Artificial Sequence: Synthetic peptide
QIS

SEQ ID NO: 100 - protein, 9 aa, Artificial Sequence
  Description of Artificial Sequence: Synthetic peptide
LQGTHYPVL

SEQ ID NO: 101 - protein, 116 aa, Artificial Sequence
  Description of Artificial Sequence: Synthetic polypeptide
QVQLVQSGAEVKKPGASVKVSCKASGYYTEAYYIHWVRQAPGQGLEWMGRIDPATGNTKYAPRLQDRVTMTRDTSTSTVYMELSSLRSEDTAVYYCASLYSLPVYWGQGTTVTVSS

SEQ ID NO: 102 - protein, 8 aa, Artificial Sequence
  Description of Artificial Sequence: Synthetic peptide
GYYTEAYY

SEQ ID NO: 103 - protein, 8 aa, Artificial Sequence
  Description of Artificial Sequence: Synthetic peptide
IDPATGNT

SEQ ID NO: 104 - protein, 9 aa, Artificial Sequence
  Description of Artificial Sequence: Synthetic peptide
ASLYSLPVY

SEQ ID NO: 105 - protein, 107 aa, Artificial Sequence [sequence omitted]

SEQ ID NO: 106 - protein, 6 aa, Artificial Sequence
  Description of Artificial Sequence: Synthetic peptide
QSISSY

SEQ ID NO: 107 - protein, 3 aa, Artificial Sequence
  Description of Artificial Sequence: Synthetic peptide
AAS

SEQ ID NO: 108 - protein, 9 aa, Artificial Sequence
  Description of Artificial Sequence: Synthetic peptide
QQSYSTPLT

SEQ ID NO: 109 - protein, 124 aa, Artificial Sequence
  Description of Artificial Sequence: Synthetic polypeptide
QVQLVESGGGVVQPGRSLRLSCAASGFAFSSYGMHWVRQAPGKGLEWVAVIWFDGTKKYYTDSVKGRFTISRDNSKNTLYLQMNTLRAEDTAVYYCARDRGIGARRGPYYMDVWGKGTTVTVSS

SEQ ID NO: 110 - protein, 8 aa, Artificial Sequence
  Description of Artificial Sequence: Synthetic peptide
GFAFSSYG

SEQ ID NO: 111 - protein, 8 aa, Artificial Sequence
  Description of Artificial Sequence: Synthetic peptide
IWFDGTKK

SEQ ID NO: 112 - protein, 17 aa, Artificial Sequence
  Description of Artificial Sequence: Synthetic peptide
ARDRGIGARRGPYYMDV

SEQ ID NO: 113 - protein, 108 aa, Artificial Sequence [sequence omitted]

SEQ ID NO: 114 - protein, 7 aa, Artificial Sequence
  Description of Artificial Sequence: Synthetic peptide
QSVSSSY

SEQ ID NO: 115 - protein, 3 aa, Artificial Sequence
  Description of Artificial Sequence: Synthetic peptide
GAS

SEQ ID NO: 116 - protein, 9 aa, Artificial Sequence
  Description of Artificial Sequence: Synthetic peptide
LQIYNMPIT

SEQ ID NO: 117 - protein, 126 aa, Artificial Sequence [sequence omitted]

SEQ ID NO: 118 - protein, 8 aa, Artificial Sequence
  Description of Artificial Sequence: Synthetic peptide
GFTFSSYA

SEQ ID NO: 119 - protein, 8 aa, Artificial Sequence
  Description of Artificial Sequence: Synthetic peptide
INASGTRT

SEQ ID NO: 120 - protein, 19 aa, Artificial Sequence
  Description of Artificial Sequence: Synthetic peptide
ARGKGNTHKPYGYVRYFDV

SEQ ID NO: 121 - protein, 108 aa, Artificial Sequence
  Description of Artificial Sequence: Synthetic polypeptide
EIVLTQSPGTLSLSPGERATLSCRASQSVSSSYLAWYQQKPGQAPRLLIYGASSRATGIPDRFSGSGSGTDFTLTISRLEPEDFAVYYCQQYGSSPYTFGQGTKLEIK

SEQ ID NO: 122 - protein, 7 aa, Artificial Sequence
  Description of Artificial Sequence: Synthetic peptide
QSVSSSY

SEQ ID NO: 123 - protein, 3 aa, Artificial Sequence
  Description of Artificial Sequence: Synthetic peptide
GAS

SEQ ID NO: 124 - protein, 9 aa, Artificial Sequence
  Description of Artificial Sequence: Synthetic peptide
QQYGSSPYT

SEQ ID NO: 125 - protein, 116 aa, Artificial Sequence
  Description of Artificial Sequence: Synthetic polypeptide
EVQLLESGGGLVQPGGSLRLSCAASGFTFSSYAMNWVRQAPGKGLEWVSTTSGSGASTYYADSVKGRFTISRDNSKNTLYLQMNSLRAEDTAVYYCAKIWIAFDIWGQGTMVTVSS

SEQ ID NO: 126 - protein, 8 aa, Artificial Sequence
  Description of Artificial Sequence: Synthetic peptide
GFTFSSYA

SEQ ID NO: 127 - protein, 8 aa, Artificial Sequence
  Description of Artificial Sequence: Synthetic peptide
TSGSGAST

SEQ ID NO: 128 - protein, 9 aa, Artificial Sequence
  Description of Artificial Sequence: Synthetic peptide
AKIWIAFDI

SEQ ID NO: 129 - protein, 107 aa, Artificial Sequence
  Description of Artificial Sequence: Synthetic polypeptide
DIQMTQTTSSLSASLGDRVTISCRASQDINNYLNWYQQKPDGTVKLLIHYTSRLHSGVPSRFSGSGSGTDYSLTISNLEQEDIATYFCQQGNTLPWTFGGGTKLEIK

SEQ ID NO: 130 - protein, 6 aa, Artificial Sequence
  Description of Artificial Sequence: Synthetic peptide
QDINNY

SEQ ID NO: 131 - protein, 3 aa, Artificial Sequence
  Description of Artificial Sequence: Synthetic peptide
YTS

SEQ ID NO: 132 - protein, 9 aa, Artificial Sequence
  Description of Artificial Sequence: Synthetic peptide
QQGNTLPWT

SEQ ID NO: 133 - protein, 118 aa, Artificial Sequence
  Description of Artificial Sequence: Synthetic polypeptide
QVQLQQPGAELVKPGTSVKLSCKASGYNFTSYWINWVKLRPGQGLEWIGDIYPGSGITNYNEKFKSKATLTVDTSSSTAYMQLSSLASEDSALYYCAGQYGNLWFAYWGQGTLVTVSS

SEQ ID NO: 134 - protein, 8 aa, Artificial Sequence
  Description of Artificial Sequence: Synthetic peptide
GYNFTSYW

SEQ ID NO: 135 - protein, 8 aa, Artificial Sequence
  Description of Artificial Sequence: Synthetic peptide
IYPGSGIT

SEQ ID NO: 136 - protein, 11 aa, Artificial Sequence
  Description of Artificial Sequence: Synthetic peptide
AGQYGNLWFAY

SEQ ID NO: 137 - protein, 109 aa, Artificial Sequence
  Description of Artificial Sequence: Synthetic polypeptide
QAVVIQESALTTPPGETVTLTCGSSTGAVTASNYANWVQEKPDHCFTGLIGGHNNRPPGVPARFSGSLIGDKAALTIAGTQTEDEAIYFCALWYSDHWVIGGGTRLTVL

SEQ ID NO: 138 - protein, 9 aa, Artificial Sequence
  Description of Artificial Sequence: Synthetic peptide
TGAVTASNY

SEQ ID NO: 139 - protein, 3 aa, Artificial Sequence
  Description of Artificial Sequence: Synthetic peptide
GHN

SEQ ID NO: 140 - protein, 13 aa, Artificial Sequence
  Description of Artificial Sequence: Synthetic peptide
ALWYSDHWVIGGG

SEQ ID NO: 141 - protein, 119 aa, Artificial Sequence
  Description of Artificial Sequence: Synthetic polypeptide
HVKLQESGPGLVQPSQSLSLTCTVSGFSLTDYGVHWVRQSPGKGLEWLGVIWSGGGTAYNTALISRLNIYRDNSKNQVFLEMNSLQAEDTAMYYCARRGSYPYNYFDAWGCGTTVTVSS

SEQ ID NO: 142 - protein, 8 aa, Artificial Sequence
  Description of Artificial Sequence: Synthetic peptide
GFSLTDYG

SEQ ID NO: 143 - protein, 7 aa, Artificial Sequence
  Description of Artificial Sequence: Synthetic peptide
IWSGGGT

SEQ ID NO: 144 - protein, 13 aa, Artificial Sequence
  Description of Artificial Sequence: Synthetic peptide
ARRGSYPYNYFDA

SEQ ID NO: 145 - protein, 107 aa, Artificial Sequence
  Description of Artificial Sequence: Synthetic polypeptide
DIVMTQSQRFMSTTVGDRVSITCKASQNVVSAVAWYQQKPGQSPKLLIYSASNRYTGVPDRFTGSGSGTDFTLTISNMQSEDLADFFCQQYSNYPWTFGGGTKLEIK

SEQ ID NO: 146 - protein, 6 aa, Artificial Sequence
  Description of Artificial Sequence: Synthetic peptide
QNVVSA

SEQ ID NO: 147 - protein, 3 aa, Artificial Sequence
  Description of Artificial Sequence: Synthetic peptide
SAS

SEQ ID NO: 148 - protein, 9 aa, Artificial Sequence
  Description of Artificial Sequence: Synthetic peptide
QQYSNYPWT

SEQ ID NO: 149 - protein, 119 aa, Artificial Sequence
  Description of Artificial Sequence: Synthetic polypeptide
DVKLVESGGGLVKLGGSLKLSCAASGFTFSNYYMSWVRQTPEKRLELVAAINSDGGITYYLDTVKGRFTISRDNAKNTLYLQMSSLKSEDTALFYCARHRSGYFSMDYWGQGTSVTVSS

SEQ ID NO: 150 - protein, 8 aa, Artificial Sequence
  Description of Artificial Sequence: Synthetic peptide
GFTFSNYY

SEQ ID NO: 151 - protein, 8 aa, Artificial Sequence
  Description of Artificial Sequence: Synthetic peptide
INSDGGIT

SEQ ID NO: 152 - protein, 12 aa, Artificial Sequence
  Description of Artificial Sequence: Synthetic peptide
ARHRSGYFSMDY

SEQ ID NO: 153 - protein, 109 aa, Artificial Sequence
  Description of Artificial Sequence: Synthetic polypeptide
EIVLTQSPATLSLSPGERATLSCRASQSVSDAYLAWYQQKPGQAPRLLIYDASSRATGVPARFSGSGSGTDFTLTISSLEPEDFAVYYCHQYIQLHSFTFGQGTKVEIK

SEQ ID NO: 154 - protein, 7 aa, Artificial Sequence
  Description of Artificial Sequence: Synthetic peptide
QSVSDAY

SEQ ID NO: 155 - protein, 3 aa, Artificial Sequence
  Description of Artificial Sequence: Synthetic peptide
DAS

SEQ ID NO: 156 - protein, 10 aa, Artificial Sequence
  Description of Artificial Sequence: Synthetic peptide
HQYIQLHSFT

SEQ ID NO: 157 - protein, 119 aa, Artificial Sequence
  Description of Artificial Sequence: Synthetic polypeptide
QVQLVQSGAEVKKPGSSVKVSCKASGGTFSSYGISWVRQAPGQGLEWMGGIIPIFGTANYAQKFQGRVTITADESTSTAYMELSSLRSEDTAVYYCARYDGIYGELDFWGQGTLVTVSS

SEQ ID NO: 158 - protein, 8 aa, Artificial Sequence
  Description of Artificial Sequence: Synthetic peptide
GGTFSSYG

SEQ ID NO: 159 - protein, 8 aa, Artificial Sequence
  Description of Artificial Sequence: Synthetic peptide
IIPIFGTA

SEQ ID NO: 160 - protein, 12 aa, Artificial Sequence
  Description of Artificial Sequence: Synthetic peptide
ARYDGIYGELDF

SEQ ID NO: 161 - protein, 106 aa, Artificial Sequence
  Description of Artificial Sequence: Synthetic polypeptide
QIVLSQSPAILSASPGEKVTMTCRASSSVSYMHWYQQKPGSSPKPWIYATSNLASGVPVRFSGSGSGTSYSLTISRVEAEDAATYYCQQWSSNPLTFGAGTKLELK

SEQ ID NO: 162 - protein, 5 aa, Artificial Sequence
  Description of Artificial Sequence: Synthetic peptide
SSVSY

SEQ ID NO: 163 - protein, 3 aa, Artificial Sequence
  Description of Artificial Sequence: Synthetic peptide
ATS

SEQ ID NO: 164 - protein, 9 aa, Artificial Sequence
  Description of Artificial Sequence: Synthetic peptide
QQWSSNPLT

SEQ ID NO: 165 - protein, 118 aa, Artificial Sequence
  Description of Artificial Sequence: Synthetic polypeptide
EVKLEESGGGLVQPGGSMKLSCAASGFTFSDAWMDWVRQSPEKGLEWVAEIRSKASNHATYYAESVKGRFTISRDDSKSSVYLQMNSLRAEDTGIYYCTRWRRFFDSWGQGTTLTVSS

SEQ ID NO: 166 - protein, 8 aa, Artificial Sequence
  Description of Artificial Sequence: Synthetic peptide
GFTFSDAW

SEQ ID NO: 167 - protein, 10 aa, Artificial Sequence
  Description of Artificial Sequence: Synthetic peptide
IRSKASNHAT

SEQ ID NO: 168 - protein, 9 aa, Artificial Sequence
  Description of Artificial Sequence: Synthetic peptide
TRWRRFFDS

SEQ ID NO: 169 - protein, 111 aa, Artificial Sequence
  Description of Artificial Sequence: Synthetic polypeptide
EIVLTQSPATLSLSPGERATLSCKASQSVDYDGDNYMNWYQQKPGQAPRLLIYAASNLESGIPARFSGSGSGTDFTLTISSLEPEDFAVYYCHLSNEDLSTFGGGTKVEIK

SEQ ID NO: 170 - protein, 10 aa, Artificial Sequence
  Description of Artificial Sequence: Synthetic peptide
QSVDYDGDNY

SEQ ID NO: 171 - protein, 3 aa, Artificial Sequence
  Description of Artificial Sequence: Synthetic peptide
AAS

SEQ ID NO: 172 - protein, 9 aa, Artificial Sequence
  Description of Artificial Sequence: Synthetic peptide
HLSNEDLST

SEQ ID NO: 173 - protein, 122 aa, Artificial Sequence
  Description of Artificial Sequence: Synthetic polypeptide
QVQLVQSGAEVKKPGSSVKVSCKASGYTFTDNYMIWVRQAPGQGLEWMGDINPYNGGTTFNQKFKGRVTITADKSTSTAYMELSSLRSEDTAVYYCARESPYFSNLYVMDYWGQGTLVTVSS

SEQ ID NO: 174 - protein, 8 aa, Artificial Sequence
  Description of Artificial Sequence: Synthetic peptide
GYTFTDNY

SEQ ID NO: 175 - protein, 8 aa, Artificial Sequence
  Description of Artificial Sequence: Synthetic peptide
INPYNGGT

SEQ ID NO: 176 - protein, 16 aa, Artificial Sequence
  Description of Artificial Sequence: Synthetic peptide
ARESPYFSNLYVMDYW

SEQ ID NO: 177 - protein, 111 aa, Artificial Sequence
  Description of Artificial Sequence: Synthetic polypeptide
QSVLTQPPSVSGAPGQRVTISCTGSGSNIGAPYDVSWYQQLPGTAPKLLIYHNNKRPSGVPDRFSGSKSGTSASLAITGLQAEDEADYYCATVEAGLSGSVFGGGTKLTVL

SEQ ID NO: 178 - protein, 9 aa, Artificial Sequence
  Description of Artificial Sequence: Synthetic peptide
GSNIGAPYD

SEQ ID NO: 179 - protein, 3 aa, Artificial Sequence
  Description of Artificial Sequence: Synthetic peptide
HNN

SEQ ID NO: 180 - protein, 11 aa, Artificial Sequence
  Description of Artificial Sequence: Synthetic peptide
ATVEAGLSGSV

SEQ ID NO: 181 - protein, 120 aa, Artificial Sequence
  Description of Artificial Sequence: Synthetic polypeptide
QVQLVQSGAEVKKPGASVKVSCKVSGYTLTELSIHWVRQAPGKGLEWMGGFDPEENEIVYAQRFQGRVTMTEDTSTDTAYMELSSLRSEDTAVYYCAIVGSFSPLTLGLWGQGTMVTVSS

SEQ ID NO: 182 - protein, 8 aa, Artificial Sequence
  Description of Artificial Sequence: Synthetic peptide
GYTLTELS

SEQ ID NO: 183 - protein, 8 aa, Artificial Sequence
  Description of Artificial Sequence: Synthetic peptide
FDPEENEI

SEQ ID NO: 184 - protein, 13 aa, Artificial Sequence
  Description of Artificial Sequence: Synthetic peptide
AIVGSFSPLTLGL

SEQ ID NO: 185 - protein, 107 aa, Artificial Sequence [sequence omitted]

SEQ ID NO: 186 - protein, 6 aa, Artificial Sequence
  Description of Artificial Sequence: Synthetic peptide
KTISKY

SEQ ID NO: 187 - protein, 3 aa, Artificial Sequence
  Description of Artificial Sequence: Synthetic peptide
SGS

SEQ ID NO: 188 - protein, 9 aa, Artificial Sequence
  Description of Artificial Sequence: Synthetic peptide
QQHNEYPLT

SEQ ID NO: 189 - protein, 121 aa, Artificial Sequence [sequence omitted]

SEQ ID NO: 190 - protein, 8 aa, Artificial Sequence
  Description of Artificial Sequence: Synthetic peptide
GYSFTGHW

SEQ ID NO: 191 - protein, 8 aa, Artificial Sequence
  Description of Artificial Sequence: Synthetic peptide
IHPSDSET

SEQ ID NO: 192 - protein, 15 aa, Artificial Sequence
  Description of Artificial Sequence: Synthetic peptide
ARGIYFYGTTYFDYW

SEQ ID NO: 193 - protein, 113 aa, Artificial Sequence
  Description of Artificial Sequence: Synthetic polypeptide
DFVMTQSPSSLTVTAGEKVTMSCKSSQSLLNSGNQKNYLTWYLQKPGQPPKLLIYWASTRESGVPDRFTGSGSGTDFTLTISSVQAEDLAVYYCQNDYSYPYTFGGGTKLEIK

SEQ ID NO: 194 - protein, 12 aa, Artificial Sequence
  Description of Artificial Sequence: Synthetic peptide
QSLLNSGNQKNY

SEQ ID NO: 195 - protein, 3 aa, Artificial Sequence
  Description of Artificial Sequence: Synthetic peptide
WAS

SEQ ID NO: 196 - protein, 9 aa, Artificial Sequence
  Description of Artificial Sequence: Synthetic peptide
QNDYSYPYT

SEQ ID NO: 197 - protein, 120 aa, Artificial Sequence
  Description of Artificial Sequence: Synthetic polypeptide
EVQLQQSGPELVKPGASVKMSCKASGYTFTDYYMKWVKQSHGKSLEWIGDIIPSNGATFYNQKFKGKATLTVDRSSSTAYMHLNSLTSEDSAVYYCTRSHLLRASWFAYWGQGTLVTVSA

SEQ ID NO: 198 - protein, 8 aa, Artificial Sequence
  Description of Artificial Sequence: Synthetic peptide
GYTFTDYY

SEQ ID NO: 199 - protein, 8 aa, Artificial Sequence
  Description of Artificial Sequence: Synthetic peptide
IIPSNGAT

SEQ ID NO: 200 - protein, 13 aa, Artificial Sequence
  Description of Artificial Sequence: Synthetic peptide
TRSHLLRASWFAY

SEQ ID NO: 201 - protein, 109 aa, Artificial Sequence
  Description of Artificial Sequence: Synthetic polypeptide
QAVVTQEPSLTVSPGGTVTLTCRSSTGAVTTSNYANWVQQKPGQAPRGLIGGTNKRAPWTPARFSGSLLGGKAALTITGAQAEDEADYYCALWYSNLWVFGGGTKLTVL

SEQ ID NO: 202 - protein, 9 aa, Artificial Sequence
  Description of Artificial Sequence: Synthetic peptide
TGAVTTSNY

SEQ ID NO: 203 - protein, 3 aa, Artificial Sequence
  Description of Artificial Sequence: Synthetic peptide
GTN

SEQ ID NO: 204 - protein, 9 aa, Artificial Sequence
  Description of Artificial Sequence: Synthetic peptide
ALWYSNLWV

SEQ ID NO: 205 - protein, 125 aa, Artificial Sequence
  Description of Artificial Sequence: Synthetic polypeptide
EVQLVESGGGLVQPGGSLRLSCAASGFTFSTYAMNWVRQAPGKGLEWVGRIRSKYNNYATYYADSVKDRFTISRDDSKNSLYLQMNSLKTEDTAVYYCVRHGNFGNSYVSWFAYWGQGTLVTVSS

SEQ ID NO: 206 - protein, 8 aa, Artificial Sequence
  Description of Artificial Sequence: Synthetic peptide
GFTFSTYA

SEQ ID NO: 207 - protein, 10 aa, Artificial Sequence
  Description of Artificial Sequence: Synthetic peptide
IRSKYNNYAT

SEQ ID NO: 208 - protein, 16 aa, Artificial Sequence
  Description of Artificial Sequence: Synthetic peptide
VRHGNFGNSYVSWFAY

SEQ ID NO: 209 - protein, 107 aa, Artificial Sequence
  Description of Artificial Sequence: Synthetic polypeptide
DIQMTQSPSSLSASVGDRVTITCRASQDISNYLNWYQQKPGKAPKLLIYYTSRLRSGVPSRFSGSGSGTDFTLTISSLQPEDFATYYCQQGHTLPPTFGQGTKVEIK

SEQ ID NO: 210 - protein, 6 aa, Artificial Sequence
  Description of Artificial Sequence: Synthetic peptide
QDISNY

SEQ ID NO: 211 - protein, 3 aa, Artificial Sequence
  Description of Artificial Sequence: Synthetic peptide
YTS

SEQ ID NO: 212 - protein, 9 aa, Artificial Sequence
  Description of Artificial Sequence: Synthetic peptide
QQGHTLPPT

SEQ ID NO: 213 - protein, 117 aa, Artificial Sequence
  Description of Artificial Sequence: Synthetic polypeptide
EVQLVQSGAEVKKPGASVKVSCKASGYTFTDSYMSWVRQAPGQGLEWIGDMYPDNGDSSYNQKFRERVTITRDTSTSTAYLELSSLRSEDTAVYYCVLAPRWYFSVWGQGTLVTVSS

SEQ ID NO: 214 - protein, 8 aa, Artificial Sequence
  Description of Artificial Sequence: Synthetic peptide
GYTFTDSY

SEQ ID NO: 215 - protein, 8 aa, Artificial Sequence
  Description of Artificial Sequence: Synthetic peptide
MYPDNGDS

SEQ ID NO: 216 - protein, 11 aa, Artificial Sequence
  Description of Artificial Sequence: Synthetic peptide
VLAPRWYFSVW

SEQ ID NO: 217 - protein, 108 aa, Artificial Sequence
  Description of Artificial Sequence: Synthetic polypeptide
SYELTQPPSVSVSPGQTASITCSGDNIGDQYAHWYQQKPGQSPVLVIYQDKNRPSGIPERFSGSNSGNTATLTISGTQAMDEADYYCATYTGFGSLAVFGGGTKLTVL

SEQ ID NO: 218 - protein, 6 aa, Artificial Sequence
  Description of Artificial Sequence: Synthetic peptide
NIGDQY

SEQ ID NO: 219 - protein, 3 aa, Artificial Sequence
  Description of Artificial Sequence: Synthetic peptide
QDK

SEQ ID NO: 220 - protein, 11 aa, Artificial Sequence
  Description of Artificial Sequence: Synthetic peptide
ATYTGFGSLAV

SEQ ID NO: 221 - protein, 116 aa, Artificial Sequence
  Description of Artificial Sequence: Synthetic polypeptide
EVQLVQSGAEVKKPGESLRISCKGSGYSFSTYWISWVRQMPGKGLEWMGKIYPGDSYTNYSPSFQGQVTISADKSISTAYLQWSSLKASDTAMYYCARGYGIFDYWGQGTLVTVSS

SEQ ID NO: 222 - protein, 8 aa, Artificial Sequence
  Description of Artificial Sequence: Synthetic peptide
GYSFSTYW

SEQ ID NO: 223 - protein, 8 aa, Artificial Sequence
  Description of Artificial Sequence: Synthetic peptide
IYPGDSYT

SEQ ID NO: 224 - protein, 9 aa, Artificial Sequence
  Description of Artificial Sequence: Synthetic peptide
ARGYGIFDY

SEQ ID NO: 225 - protein, 109 aa, Artificial Sequence
  Description of Artificial Sequence: Synthetic polypeptide
EIVLTQSPATLSLSPGERATLSCRASQSVSSYLAWYQQKPGQAPRLLIYDASNRATGIPARFSGSGSGTDFTLTISSLEPEDFAVYYCQQRSNWPPALTFCGGTKVEIK

SEQ ID NO: 226 - protein, 6 aa, Artificial Sequence
  Description of Artificial Sequence: Synthetic peptide
QSVSSY

SEQ ID NO: 227 - protein, 3 aa, Artificial Sequence
  Description of Artificial Sequence: Synthetic peptide
DAS

SEQ ID NO: 228 - protein, 11 aa, Artificial Sequence
  Description of Artificial Sequence: Synthetic peptide
QQRSNWPPALT

SEQ ID NO: 229 - protein, 121 aa, Artificial Sequence [sequence omitted]

SEQ ID NO: 230 - protein, 8 aa, Artificial Sequence
  Description of Artificial Sequence: Synthetic peptide
GGSFSGYY

SEQ ID NO: 231 - protein, 7 aa, Artificial Sequence
  Description of Artificial Sequence: Synthetic peptide
INHGGYV

SEQ ID NO: 232 - protein, 15 aa, Artificial Sequence
  Description of Artificial Sequence: Synthetic peptide
ARDYGPGNYDWYFDL

SEQ ID NO: 233 - protein, 107 aa, Artificial Sequence
  Description of Artificial Sequence: Synthetic polypeptide
DIQMTQSPSSLSASVGDRVTITCRASQSINSYLDWYQQKPGKAPKLLIYAASSLQSGVPSRFSGSGSGTDFTLTISSLQPEDFATYYCQQYYSTPFTFGPGTKVEIK

SEQ ID NO: 234 - protein, 6 aa, Artificial Sequence
  Description of Artificial Sequence: Synthetic peptide
QSINSY

SEQ ID NO: 235 - protein, 3 aa, Artificial Sequence
  Description of Artificial Sequence: Synthetic peptide
AAS

SEQ ID NO: 236 - protein, 9 aa, Artificial Sequence
  Description of Artificial Sequence: Synthetic peptide
QQYYSTPFT

SEQ ID NO: 237 - protein, 125 aa, Artificial Sequence
  Description of Artificial Sequence: Synthetic polypeptide
QVQLVESGGGVVQPGRSLRLSCAASGFTFSSYGMHWVRQAPGKGLEWVAVIWYDGSNKYYADSVKGRFTISRDNSKNTLYLQMNSLRAEDTAVYYCARDPRGATLYYYYYGMDVWGQGTTVTVSS

SEQ ID NO: 238 - protein, 8 aa, Artificial Sequence
  Description of Artificial Sequence: Synthetic peptide
GFTFSSYG

SEQ ID NO: 239 - protein, 8 aa, Artificial Sequence
  Description of Artificial Sequence: Synthetic peptide
IWYDGSNK

SEQ ID NO: 240 - protein, 18 aa, Artificial Sequence
  Description of Artificial Sequence: Synthetic peptide
ARDPRGATLYYYYYGMDV

SEQ ID NO: 241 - protein, 108 aa, Artificial Sequence
  Description of Artificial Sequence: Synthetic polypeptide
EIVLTQSPGTLSLSPGERATLSCRASQSVGSSYLAWYQQKPGQAPRLLIYGAFSRATGIPDRFSGSGSGTDFTLTISRLEPEDFAVYYCQQYGSSPWTFGQGTKVEIK

SEQ ID NO: 242 - protein, 7 aa, Artificial Sequence
  Description of Artificial Sequence: Synthetic peptide
QSVGSSY

SEQ ID NO: 243 - protein, 3 aa, Artificial Sequence
  Description of Artificial Sequence: Synthetic peptide
GAF

SEQ ID NO: 244 - protein, 9 aa, Artificial Sequence
  Description of Artificial Sequence: Synthetic peptide
QQYGSSPWT

SEQ ID NO: 245 - protein, 118 aa, Artificial Sequence
  Description of Artificial Sequence: Synthetic polypeptide
QVQLVESGGGVVQPGRSLRLSCAASGFTFSSYTMHWVRQAPGKGLEWVTFISYDGNNKYYADSVKGRFTISRDNSKNTLYLQMNSLRAEDTAIYYCARTGWLGPFDYWGQGTLVTVSS

SEQ ID NO: 246 - protein, 8 aa, Artificial Sequence
  Description of Artificial Sequence: Synthetic peptide
GFTFSSYT

SEQ ID NO: 247 - protein, 8 aa, Artificial Sequence
  Description of Artificial Sequence: Synthetic peptide
ISYDGNNK

SEQ ID NO: 248 - protein, 11 aa, Artificial Sequence
  Description of Artificial Sequence: Synthetic peptide
ARTGWLGPFDY

SEQ ID NO: 249 - protein, 111 aa, Artificial Sequence
  Description of Artificial Sequence: Synthetic polypeptide
DTVLTQSPASLAVSLGQRATISCKASQSVDFDGDSFMNWYQQKPGQPPKLLIYTTSNLESGIPARFSASGSGTDFTLNIHPVEEEDTATYYCQQSNEDPYTFGGGTKLEIK

SEQ ID NO: 250 - protein, 10 aa, Artificial Sequence
  Description of Artificial Sequence: Synthetic peptide
QSVDFDGDSF

SEQ ID NO: 251 - protein, 3 aa, Artificial Sequence
  Description of Artificial Sequence: Synthetic peptide
TTS

SEQ ID NO: 252 - protein, 9 aa, Artificial Sequence
  Description of Artificial Sequence: Synthetic peptide
QQSNEDPYT

SEQ ID NO: 253 - protein, 118 aa, Artificial Sequence
  Description of Artificial Sequence: Synthetic polypeptide
QVTLKESGPGILQPSQTLSLTCSFSGFSLRTSGMGVGWIRQPSGKGLEWLAHIWWDDDKRYNPALKSRLTISKDTSSNQVFLKIASVDTADTATYYCAQINPAWFAYWGQGTLVTVSA

SEQ ID NO: 254 - protein, 10 aa, Artificial Sequence
  Description of Artificial Sequence: Synthetic peptide
GFSLRTSGMG

SEQ ID NO: 255 - protein, 7 aa, Artificial Sequence
  Description of Artificial Sequence: Synthetic peptide
IWWDDDK

SEQ ID NO: 256 - protein, 10 aa, Artificial Sequence
  Description of Artificial Sequence: Synthetic peptide
AQINPAWFAY

SEQ ID NO: 257 - protein, 107 aa, Artificial Sequence
  Description of Artificial Sequence: Synthetic polypeptide
DIQMTQSPSSLSASVGDRVTITCRASQGISSWLAWYQQKPEKAPKSLIYAASSLQSGVPSRFSGSGSGTDFTLTISSLQPEDFVTYYCQQYNSYPRTFGQGTKVEIK

SEQ ID NO: 258 - protein, 6 aa, Artificial Sequence
  Description of Artificial Sequence: Synthetic peptide
QGISSW

SEQ ID NO: 259 - protein, 3 aa, Artificial Sequence
  Description of Artificial Sequence: Synthetic peptide
AAS

SEQ ID NO: 260 - protein, 9 aa, Artificial Sequence
  Description of Artificial Sequence: Synthetic peptide
QQYNSYPRT

SEQ ID NO: 261 - protein, 125 aa, Artificial Sequence
  Description of Artificial Sequence: Synthetic polypeptide
EVQLVESGGGLVQPGGSLRLSCAAAGFTFSSYSMNWVRQAPGKGLEWVSYISSRSRTIYYADSVKGRFTISRDNAKNSLYLQMNSLRDEDTAVYYCARDYGGQPPYYYYYGMDVWGQGTTVTVSS

SEQ ID NO: 262 - protein, 8 aa, Artificial Sequence
  Description of Artificial Sequence: Synthetic peptide
GFTFSSYS

SEQ ID NO: 263 - protein, 8 aa, Artificial Sequence
  Description of Artificial Sequence: Synthetic peptide
ISSRSRTI

SEQ ID NO: 264 - protein, 18 aa, Artificial Sequence
  Description of Artificial Sequence: Synthetic peptide
ARDYGGQPPYYYYYGMDV

SEQ ID NO: 265 - protein, 107 aa, Artificial Sequence
  Description of Artificial Sequence: Synthetic polypeptide
DIQMTQTTSSLSASLGDRVTISCRASQDISKYLNWYQQKPDGTVKLLIYHTSRLHSGVPSRFSGSGSGTDYSLTISNLEQEDIATYFCQQGNTLPYTFGGGTKLEIK

SEQ ID NO: 266 - protein, 6 aa, Artificial Sequence
  Description of Artificial Sequence: Synthetic peptide
QDISKY

SEQ ID NO: 267 - protein, 3 aa, Artificial Sequence
  Description of Artificial Sequence: Synthetic peptide
HTS

SEQ ID NO: 268 - protein, 9 aa, Artificial Sequence
  Description of Artificial Sequence: Synthetic peptide
QQGNTLPYT

SEQ ID NO: 269 - protein, 120 aa, Artificial Sequence
  Description of Artificial Sequence: Synthetic polypeptide
EVKLQESGPGLVAPSQSLSVTCTVSGVSLPDYGVSWIRQPPRKGLEWLGVIWGSETTYYNSALKSRLTIIKDNSKSQVFLKMNSLQTDDTAIYYCAKHYYYGGSYAMDYWGQGTSVTVSS

SEQ ID NO: 270 - protein, 8 aa, Artificial Sequence
  Description of Artificial Sequence: Synthetic peptide
GVSLPDYG

SEQ ID NO: 271 - protein, 7 aa, Artificial Sequence
  Description of Artificial Sequence: Synthetic peptide
IWGSETT

SEQ ID NO: 272 - protein, 14 aa, Artificial Sequence
  Description of Artificial Sequence: Synthetic peptide
AKHYYYGGSYAMDY

SEQ ID NO: 273 - protein, 111 aa, Artificial Sequence
  Description of Artificial Sequence: Synthetic polypeptide
EIVLTQSPDFQSVTPKEKVTITCRASESVDTFGISFMNWFQQKPDQSPKLLIHEASNQGSGVPSRFSGSGSGTDFTLTINSLEAEDAATYYCQQSKEVPFTFGGGTKVEIK

SEQ ID NO: 274 - protein, 10 aa, Artificial Sequence
  Description of Artificial Sequence: Synthetic peptide
ESVDTFGISF

SEQ ID NO: 275 - protein, 3 aa, Artificial Sequence
  Description of Artificial Sequence: Synthetic peptide
EAS

SEQ ID NO: 276 - protein, 9 aa, Artificial Sequence
  Description of Artificial Sequence: Synthetic peptide
QQSKEVPFT

SEQ ID NO: 277 - protein, 121 aa, Artificial Sequence
  Description of Artificial Sequence: Synthetic polypeptide
EVQLVESGGGLVQPGGSLRLSCAASGFTFSSSWMNWVRQAPGKGLEWVGRIYPGDGDTNYNVKFKGRFTISRDDSKNSLYLQMNSLKTEDTAVYYCARSGFITTVRDFDYWGQGTLVTVSS

SEQ ID NO: 278 - protein, 8 aa, Artificial Sequence
  Description of Artificial Sequence: Synthetic peptide
GFTFSSSW

SEQ ID NO: 279 - protein, 8 aa, Artificial Sequence
  Description of Artificial Sequence: Synthetic peptide
IYPGDGDT

SEQ ID NO: 280 - protein, 14 aa, Artificial Sequence
  Description of Artificial Sequence: Synthetic peptide
ARSGFITTVRDFDY

SEQ ID NO: 281 - protein, 107 aa, Artificial Sequence
  Description of Artificial Sequence: Synthetic polypeptide
DIQMTQSPSSLSASVGDSVTITCQASTDISSHLNWYQQKPGKAPELLIYYGSHLLSGVPSRFSGSGSGTDFTFTISSLEAEDAATYYCGQGNRLPYTFGQGTKVEIE

SEQ ID NO: 282 - protein, 6 aa, Artificial Sequence
  Description of Artificial Sequence: Synthetic peptide
TDISSH

SEQ ID NO: 283 - protein, 3 aa, Artificial Sequence
  Description of Artificial Sequence: Synthetic peptide
YGS

SEQ ID NO: 284 - protein, 9 aa, Artificial Sequence
  Description of Artificial Sequence: Synthetic peptide
GQGNRLPYT

SEQ ID NO: 285 - protein, 119 aa, Artificial Sequence
  Description of Artificial Sequence: Synthetic polypeptide
QVQLQESGPGLVKPSETLSLTCAVSGHSISHDHAWSWVRQPPGEGLEWIGFISYSGITNYNPSLQGRVTISRDNSKNTLYLQMNSLRAEDTAVYYCARSLARTTAMDYWGEGTLVTVSS

SEQ ID NO: 286 - protein, 9 aa, Artificial Sequence
  Description of Artificial Sequence: Synthetic peptide
GHSISHDHA

SEQ ID NO: 287 - protein, 7 aa, Artificial Sequence
  Description of Artificial Sequence: Synthetic peptide
ISYSGIT

SEQ ID NO: 288 - protein, 12 aa, Artificial Sequence
  Description of Artificial Sequence: Synthetic peptide
ARSLARTTAMDY

SEQ ID NO: 289 - protein, 106 aa, Artificial Sequence
  Description of Artificial Sequence: Synthetic polypeptide
EIVLTQSPATLSLSPGERATLSCSASSSVSYMHWYQQKPGQAPRLLIYDTSKLASGIPARFSGSGSGTDFTLTISSLEPEDVAVYYCFQGSVYPFTFGQGTKLEIK

SEQ ID NO: 290 - protein, 5 aa, Artificial Sequence
  Description of Artificial Sequence: Synthetic peptide
SSVSY

SEQ ID NO: 291 - protein, 3 aa, Artificial Sequence
  Description of Artificial Sequence: Synthetic peptide
DTS

SEQ ID NO: 292 - protein, 9 aa, Artificial Sequence
  Description of Artificial Sequence: Synthetic peptide
FQGSVYPFT

SEQ ID NO: 293 - protein, 120 aa, Artificial Sequence
  Description of Artificial Sequence: Synthetic polypeptide
QVQLQESGPGLVKPSQTLSLTCTVSGGSISTSGMGVGWIRQHPGKGLEWIGHIWWDDDKRYNPALKSRVTISVDTSKNQFSLKLSSVTAADTAVYYCARMELWSYYFDYWGQGTLVTVSS

SEQ ID NO: 294 - protein, 10 aa, Artificial Sequence
  Description of Artificial Sequence: Synthetic peptide
GGSISTSGMG

SEQ ID NO: 295 - protein, 7 aa, Artificial Sequence
  Description of Artificial Sequence: Synthetic peptide
IWWDDDK

SEQ ID NO: 296 - protein, 12 aa, Artificial Sequence
  Description of Artificial Sequence: Synthetic peptide
ARMELWSYYFDY

SEQ ID NO: 297 - protein, 111 aa, Artificial Sequence
  Description of Artificial Sequence: Synthetic polypeptide
DIQLTQSPASLAVSLGQRATISCKASQSVDYDGDSYLNWYQQIPGQPPKLLIYDASNLVSGIPPRFSGSGSGTDFTLNIHPVEKVDAATYHCQQSTEDPWTFGGGTKLEIK

SEQ ID NO: 298 - protein, 10 aa, Artificial Sequence
  Description of Artificial Sequence: Synthetic peptide
QSVDYDGDSY

SEQ ID NO: 299 - protein, 3 aa, Artificial Sequence
  Description of Artificial Sequence: Synthetic peptide
DAS

SEQ ID NO: 300 - protein, 9 aa, Artificial Sequence
  Description of Artificial Sequence: Synthetic peptide
QQSTEDPWT

SEQ ID NO: 301 - protein, 124 aa, Artificial Sequence
  Description of Artificial Sequence: Synthetic polypeptide
QVQLQQSGAELVRPGSSVKISCKASGYAFSSYWMNWVKQRPGQGLEWIGQIWPGDGDTNYNGKFKGKATLTADESSSTAYMQLSSLASEDSAVYFCARRETTTVGRYYYAMDYWGQGTTVTVSS

SEQ ID NO: 302 - protein, 8 aa, Artificial Sequence
  Description of Artificial Sequence: Synthetic peptide
GYAFSSYW

SEQ ID NO: 303 - protein, 8 aa, Artificial Sequence
  Description of Artificial Sequence: Synthetic peptide
IWPGDGDT

SEQ ID NO: 304 - protein, 17 aa, Artificial Sequence
  Description of Artificial Sequence: Synthetic peptide
ARRETTTVGRYYYAMDY

SEQ ID NO: 305 - protein, 112 aa, Artificial Sequence
  Description of Artificial Sequence: Synthetic polypeptide
DIVMTQAAPSIPVTPGESVSISCRSSKSLLNSNGNTYLYWFLQRPGQSPQLLIYRMSNLASGVPDRFSGSGSGTAFTLRISRVEAEDVGVYYCMQHLEYPLTFGAGTKLEIK

SEQ ID NO: 306 - protein, 11 aa, Artificial Sequence
  Description of Artificial Sequence: Synthetic peptide
KSLLNSNGNTY

SEQ ID NO: 307 - protein, 3 aa, Artificial Sequence
  Description of Artificial Sequence: Synthetic peptide
RMS

SEQ ID NO: 308 - protein, 9 aa, Artificial Sequence
  Description of Artificial Sequence: Synthetic peptide
MQHLEYPLT

SEQ ID NO: 309 - protein, 122 aa, Artificial Sequence
  Description of Artificial Sequence: Synthetic polypeptide
QVQLQQSGPELIKPGASVKMSCKASGYTFTSYVMHWVKQKPGQGLEQIGYINPYNDGTKYNEKFKGKATLTSDKSSTAYMELSSLTSEDSAVYYCARGTYYYGSRVFDYWGQGTTLTVTVSS

SEQ ID NO: 310 - protein, 8 aa, Artificial Sequence
  Description of Artificial Sequence: Synthetic peptide
GYTFTSYV

SEQ ID NO: 311 - protein, 8 aa, Artificial Sequence
  Description of Artificial Sequence: Synthetic peptide
INPYNDGT

SEQ ID NO: 312 - protein, 14 aa, Artificial Sequence
  Description of Artificial Sequence: Synthetic peptide
ARGTYYYGSRVFDY

SEQ ID NO: 313 - protein, 104 aa, Artificial Sequence
  Description of Artificial Sequence: Synthetic polypeptide
EIVLTQSPAIMSASPGERVTMTCSASSGVNYMHWYQQKPGTSPRRWIYDTSKLASGVPARFSGSGSGTDYSLTISSMEPEDAATYYCHQRGSYTFGGGTKLEIK

SEQ ID NO: 314 - protein, 5 aa, Artificial Sequence
  Description of Artificial Sequence: Synthetic peptide
SGVNY

SEQ ID NO: 315 - protein, 3 aa, Artificial Sequence
  Description of Artificial Sequence: Synthetic peptide
DTS

SEQ ID NO: 316 - protein, 7 aa, Artificial Sequence
  Description of Artificial Sequence: Synthetic peptide
HQRGSYT

SEQ ID NO: 317 - protein, 120 aa, Artificial Sequence
  Description of Artificial Sequence: Synthetic polypeptide
QVQLVQPGAEVVKPGASVKLSCKTSGYTFTSNWMHWVKQAPGQGLEWIGEIDPSDSYTNYNQNFQGKAKLTVDKSTSTAYMEVSSLRSDDTAVYYCARGSNPYYYAMDYWGQGTSVTVSS

SEQ ID NO: 318 - protein, 8 aa, Artificial Sequence
  Description of Artificial Sequence: Synthetic peptide
GYTFTSNW

SEQ ID NO: 319 - protein, 8 aa, Artificial Sequence
  Description of Artificial Sequence: Synthetic peptide
IDPSDSYT

SEQ ID NO: 320 - protein, 13 aa, Artificial Sequence
  Description of Artificial Sequence: Synthetic peptide
ARGSNPYYYAMDY

SEQ ID NO: 321 - protein, 112 aa, Artificial Sequence
  Description of Artificial Sequence: Synthetic polypeptide
DVVMTQSPLSLPVTLGQPASISCKSSQSLLDSDGKTFLNWFQQRPGQSPRRLIYLVSKLDSGVPDRFSGSGSGTDFTLKISRVEAEDVGVYYCWQGTHFPYTFGQGTRLEIK

SEQ ID NO: 322 - protein, 11 aa, Artificial Sequence
  Description of Artificial Sequence: Synthetic peptide
QSLLDSDGKTF

SEQ ID NO: 323 - protein, 3 aa, Artificial Sequence
  Description of Artificial Sequence: Synthetic peptide
LVS

SEQ ID NO: 324 - protein, 9 aa, Artificial Sequence
  Description of Artificial Sequence: Synthetic peptide
WQGTHFPYT

SEQ ID NO: 325 - protein, 117 aa, Artificial Sequence
  Description of Artificial Sequence: Synthetic polypeptide
EVQLVESGGGLVKPGGSLRLSCAASGFTFSAYAMNWVRQAPGKGLEWVGRIRTKNNNYATYYADSVKDRFTISRDDSKNTLYLQMNSLKTEDTAVYYCTTFYGNGVWGQGTLVTVSS

SEQ ID NO: 326 - protein, 8 aa, Artificial Sequence
  Description of Artificial Sequence: Synthetic peptide
GFTFSAYA

SEQ ID NO: 327 - protein, 10 aa, Artificial Sequence
  Description of Artificial Sequence: Synthetic peptide
IRTKNNNYAT

SEQ ID NO: 328 - protein, 9 aa, Artificial Sequence
  Description of Artificial Sequence: Synthetic peptide
TTFYGNGVW

SEQ ID NO: 329 - protein, 112 aa, Artificial Sequence
  Description of Artificial Sequence: Synthetic polypeptide
DVLMTQSPLSLPVTPGEPASISCRSSRNIVHINGDTYLEWYLQKPGQSPQLLIYKVSNRFSGVPDRFSGSGSGTDFTLKISRVEAEDVGVYYCFQGSLLPWTFGQGTKVEIK

SEQ ID NO: 330 - protein, 11 aa, Artificial Sequence
  Description of Artificial Sequence: Synthetic peptide
RNIVHINGDTY

SEQ ID NO: 331 - protein, 3 aa, Artificial Sequence
  Description of Artificial Sequence: Synthetic peptide
KVS

SEQ ID NO: 332 - protein, 9 aa, Artificial Sequence
  Description of Artificial Sequence: Synthetic peptide
FQGSLLPWT

SEQ ID NO: 333 - protein, 119 aa, Artificial Sequence
  Description of Artificial Sequence: Synthetic polypeptide
EVQLVESGGDLVQPGRSLRLSCAASGFIFSNYGMSWVRQAPGKGLEWVATISSASTYSYYPDSVKGRFTISRDNAKNSLYLQMNSLRVEDTALYYCGRHSDGNFAFGYWGQGTLVTVSS

SEQ ID NO: 334 - protein, 8 aa, Artificial Sequence
  Description of Artificial Sequence: Synthetic peptide
GFIFSNYG

SEQ ID NO: 335 - protein, 8 aa, Artificial Sequence
  Description of Artificial Sequence: Synthetic peptide
ISSASTYS

SEQ ID NO: 336 - protein, 12 aa, Artificial Sequence
  Description of Artificial Sequence: Synthetic peptide
GRHSDGNFAFGY

SEQ ID NO: 337 - protein, 112 aa, Artificial Sequence
  Description of Artificial Sequence: Synthetic polypeptide
DIVMTQSPLSLPVTPGEPASISCRSSQRLLSSYGHTYLHWYLQKPGQSPQLLIYEVSNRFSGVPDRFSGSGSGTDFTLKISRVEAEDVGVYYCSQSTHVPLTFGQGTKVEIK

SEQ ID NO: 338 - protein, 11 aa, Artificial Sequence
  Description of Artificial Sequence: Synthetic peptide
QRLLSSYGHTY

SEQ ID NO: 339 - protein, 3 aa, Artificial Sequence
  Description of Artificial Sequence: Synthetic peptide
EVS

SEQ ID NO: 340 - protein, 9 aa, Artificial Sequence
  Description of Artificial Sequence: Synthetic peptide
SQSTHVPLT

SEQ ID NO: 341 - protein, 122 aa, Artificial Sequence
  Description of Artificial Sequence: Synthetic polypeptide
EVQLVESGGGLVKPGGSLRLSCAASGYTFSNYWIGWVRQAPGKGLEWIGDIYPGGNYIRNNEKFKDKTTLSADTSKNTAYLQMNSLKTEDTAVYYCGSSFGSNYVFAWFTYWGQGTLVTVSS

SEQ ID NO: 342 - protein, 8 aa, Artificial Sequence
  Description of Artificial Sequence: Synthetic peptide
GYTFSNYW

SEQ ID NO: 343 - protein, 8 aa, Artificial Sequence
  Description of Artificial Sequence: Synthetic peptide
IYPGGNYI

SEQ ID NO: 344 - protein, 16 aa, Artificial Sequence
  Description of Artificial Sequence: Synthetic peptide
GSSFGSNYVFAWFTYW

SEQ ID NO: 345 - protein, 107 aa, Artificial Sequence
  Description of Artificial Sequence: Synthetic polypeptide
EIVLTQSPATLSLSPGERATLSCRASQSVSSYLAWYQQKPGQAPRLLIYDASNRATGIPARFSGSGSGTDFTLTISSLEPEDFAVYYCQQRSNWPITFGQGTRLEIK

SEQ ID NO: 346 - protein, 6 aa, Artificial Sequence
  Description of Artificial Sequence: Synthetic peptide
QSVSSY

SEQ ID NO: 347 - protein, 3 aa, Artificial Sequence
  Description of Artificial Sequence: Synthetic peptide
DAS

SEQ ID NO: 348 - protein, 9 aa, Artificial Sequence
  Description of Artificial Sequence: Synthetic peptide
QQRSNWPIT

SEQ ID NO: 349 - protein, 122 aa, Artificial Sequence
  Description of Artificial Sequence: Synthetic polypeptide
EVQLVESGGGLVQPGRSLRLSCAASGFTFNDYAMHWVRQAPGKGLEWVSTISWNSGSIGYADSVKGRFTISRDNAKKSLYLQMNSLRAEDTALYYCAKDIQYGNYYYGMDVWGQGTTVTVSS

SEQ ID NO: 350 - protein, 8 aa, Artificial Sequence
  Description of Artificial Sequence: Synthetic peptide
GFTFNDYA

SEQ ID NO: 351 - protein, 8 aa, Artificial Sequence
  Description of Artificial Sequence: Synthetic peptide
ISWNSGSI

SEQ ID NO: 352 - protein, 15 aa, Artificial Sequence
  Description of Artificial Sequence: Synthetic peptide
AKDIQYGNYYYGMDV

SEQ ID NO: 353 - protein, 106 aa, Artificial Sequence [sequence omitted]

SEQ ID NO: 354 - protein, 5 aa, Artificial Sequence
  Description of Artificial Sequence: Synthetic peptide
SSVSY

SEQ ID NO: 355 - protein, 3 aa, Artificial Sequence
  Description of Artificial Sequence: Synthetic peptide
APS

SEQ ID NO: 356 - protein, 9 aa, Artificial Sequence
  Description of Artificial Sequence: Synthetic peptide
QQWSFNPPT

SEQ ID NO: 357 - protein, 132 aa, Artificial Sequence
  Description of Artificial Sequence: Synthetic polypeptide
QAYLQQSGAELVRPGASVKMSCKASGYTFTSYNMHWVKQTPRQGLEWIGAIYPGNGDTSYNQKFKGKATLTVDKSSSTAYMQLSSLTSEDSAVYFCARVVYYSNSYWYFDVWGTGTTVTVSGPSVFPLAPSS

SEQ ID NO: 358 - protein, 8 aa, Artificial Sequence
  Description of Artificial Sequence: Synthetic peptide
GYTFTSYN

SEQ ID NO: 359 - protein, 8 aa, Artificial Sequence
  Description of Artificial Sequence: Synthetic peptide
IYPGNGDT

SEQ ID NO: 360 - protein, 15 aa, Artificial Sequence
  Description of Artificial Sequence: Synthetic peptide
ARVVYYSNSYWYFDV

SEQ ID NO: 361 - protein, 106 aa, Artificial Sequence
  Description of Artificial Sequence: Synthetic polypeptide
QIVLSQSPAILSASPGEKVTMTCRASSSVSYMHWYQQKPGSSPKPWIYATSNLASGVPARFSGSGSGTSYSFTISRVEAEDAATYYCQQWTFNPPTFGGGTRLEIK

SEQ ID NO: 362 - protein, 5 aa, Artificial Sequence
  Description of Artificial Sequence: Synthetic peptide
SSVSY

SEQ ID NO: 363 - protein, 3 aa, Artificial Sequence
  Description of Artificial Sequence: Synthetic peptide
ATS

SEQ ID NO: 364 - protein, 9 aa, Artificial Sequence
  Description of Artificial Sequence: Synthetic peptide
QQWTFNPPT

SEQ ID NO: 365 - protein, 118 aa, Artificial Sequence
  Description of Artificial Sequence: Synthetic polypeptide
QAYLQQSGAELVRPGASVKMSCKASGYTFTSYNMHWVKQTPRQGLEWIGGIYPGNGDTSYNQKFKGKATLTVGKSSSTAYMQLSSLTSEDSAVYFCARYDYNYAMDYWGQGTSVTVSS

SEQ ID NO: 366 - protein, 8 aa, Artificial Sequence
  Description of Artificial Sequence: Synthetic peptide
GYTFTSYN

SEQ ID NO: 367 - protein, 8 aa, Artificial Sequence
  Description of Artificial Sequence: Synthetic peptide
IYPGNGDT

SEQ ID NO: 368 - protein, 11 aa, Artificial Sequence
  Description of Artificial Sequence: Synthetic peptide
ARYDYNYAMDY

SEQ ID NO: 369 - protein, 106 aa, Artificial Sequence [sequence omitted]

SEQ ID NO: 370 - protein, 5 aa, Artificial Sequence
  Description of Artificial Sequence: Synthetic peptide
SSVSY

SEQ ID NO: 371 - protein, 3 aa, Artificial Sequence
  Description of Artificial Sequence: Synthetic peptide
ATS

SEQ ID NO: 372 - protein, 9 aa, Artificial Sequence
  Description of Artificial Sequence: Synthetic peptide
QQWTSNPPT

SEQ ID NO: 373 - protein, 121 aa, Artificial Sequence [sequence omitted]

SEQ ID NO: 374 - protein, 8 aa, Artificial Sequence
  Description of Artificial Sequence: Synthetic peptide
GYTFTSYN

SEQ ID NO: 375 - protein, 8 aa, Artificial Sequence
  Description of Artificial Sequence: Synthetic peptide
IYPGNGDT

SEQ ID NO: 376 - protein, 14 aa, Artificial Sequence
  Description of Artificial Sequence: Synthetic peptide
ARSTYYGGDWYFNV

SEQ ID NO: 377 - protein, 106 aa, Artificial Sequence
  Description of Artificial Sequence: Synthetic polypeptide
DIQLTQSPSSLSASVGDRVTMTCRASSSVSYIHWFQQKPGKAPKPWIYATSNLASGVPVRFSGSGSGTDYTFTISSLQPEDIATYYCQQWTSNPPTFGGGTKLEIK

SEQ ID NO: 378 - protein, 5 aa, Artificial Sequence
  Description of Artificial Sequence: Synthetic peptide
SSVSY

SEQ ID NO: 379 - protein, 3 aa, Artificial Sequence
  Description of Artificial Sequence: Synthetic peptide
ATS

SEQ ID NO: 380 - protein, 9 aa, Artificial Sequence
  Description of Artificial Sequence: Synthetic peptide
QQWTSNPPT

SEQ ID NO: 381 - protein, 121 aa, Artificial Sequence
  Description of Artificial Sequence: Synthetic polypeptide
QVQLQQSGAEVKKPGSSVKVSCKASGYTFTSYNMHWVKQAPGQGLEWIGAIYPGNGDTSYNQKFKGKATLTADESTNTAYMELSSLRSEDTAFYYCARSTYYGGDWYFDVWGQGTTVTVSS

SEQ ID NO: 382 - protein, 8 aa, Artificial Sequence
  Description of Artificial Sequence: Synthetic peptide
GYTFTSYN

SEQ ID NO: 383 - protein, 8 aa, Artificial Sequence
  Description of Artificial Sequence: Synthetic peptide
IYPGNGDT

SEQ ID NO: 384 - protein, 14 aa, Artificial Sequence
  Description of Artificial Sequence: Synthetic peptide
ARSTYYGGDWYFDV

SEQ ID NO: 385 - protein, 112 aa, Artificial Sequence
  Description of Artificial Sequence: Synthetic polypeptide
DIVMTQTPLSLPVTPGEPASISCRSSKSLLHSNGITYLYWYLQKPGQSPQLLIYQMSNLVSGVPDRFSGSGSGTDFTLKISRVEAEDVGVYYCAQNLELPYTFGGGTKVEIK

SEQ ID NO: 386 - protein, 11 aa, Artificial Sequence
  Description of Artificial Sequence: Synthetic peptide
KSLLHSNGITY

SEQ ID NO: 387 - protein, 3 aa, Artificial Sequence
  Description of Artificial Sequence: Synthetic peptide
QMS

SEQ ID NO: 388 - protein, 9 aa, Artificial Sequence
  Description of Artificial Sequence: Synthetic peptide
AQNLELPYT

SEQ ID NO: 389 - protein, 119 aa, Artificial Sequence
  Description of Artificial Sequence: Synthetic polypeptide
QVQLVQSGAEVKKPGSSVKVSCKASGYAFSYSWINWVRQAPGQGLEWMGRIFPGDGDTDYNGKFKGRVTITADKSTSTAYMELSSLRSEDTAVYYCARNVFDGYWLVYWGQGTLVTVSS

SEQ ID NO: 390 - protein, 8 aa, Artificial Sequence
  Description of Artificial Sequence: Synthetic peptide
GYAFSYSW

SEQ ID NO: 391 - protein, 8 aa, Artificial Sequence
  Description of Artificial Sequence: Synthetic peptide
IFPGDGDT

SEQ ID NO: 392 - protein, 12 aa, Artificial Sequence
  Description of Artificial Sequence: Synthetic peptide
ARNVFDGYWLVY

SEQ ID NO: 393 - protein, 107 aa, Artificial Sequence
  Description of Artificial Sequence: Synthetic polypeptide
DIQMTQSPSSLSASIGDRVTITCKASQDINSYLSWFQQKPGKAPKLLIYRANRLVDGVPSRFSGSGSGTDYTLTISSLQPEDFAVYYCLQYDEFPYTFGGGTKLEIK

SEQ ID NO: 394 - protein, 6 aa, Artificial Sequence
  Description of Artificial Sequence: Synthetic peptide
QDINSY

SEQ ID NO: 395 - protein, 3 aa, Artificial Sequence
  Description of Artificial Sequence: Synthetic peptide
RAN

SEQ ID NO: 396 - protein, 9 aa, Artificial Sequence
  Description of Artificial Sequence: Synthetic peptide
LQYDEFPYT

SEQ ID NO: 397 - protein, 117 aa, Artificial Sequence
  Description of Artificial Sequence: Synthetic polypeptide
QVQLQQSGSELKKPGASVKISCKASGYSFTDYIILWVRQNPGKGLEWIGHIDPYYGSSNYNLKFKGRVTITADQSTTTAYMELSSLRSEDTAVYYCGRSKRDYFDYWGQGTTLTVSS

SEQ ID NO: 398 - protein, 8 aa, Artificial Sequence
  Description of Artificial Sequence: Synthetic peptide
GYSFTDYI

SEQ ID NO: 399 - protein, 8 aa, Artificial Sequence
  Description of Artificial Sequence: Synthetic peptide
IDPYYGSS

SEQ ID NO: 400 - protein, 11 aa, Artificial Sequence
  Description of Artificial Sequence: Synthetic peptide
GRSKRDYFDYW

SEQ ID NO: 401 - protein, 112 aa, Artificial Sequence
  Description of Artificial Sequence: Synthetic polypeptide
DIQLTQSPSSLAVSAGENVTMSCKSSQSVLYSANHKNYLAWYQQKPGQSPKLLIYWASTRESGVPDRFTGSGSGTDFTLTISRVQVEDLAIYYCHQYLSSWTFGGGTKLEIK

SEQ ID NO: 402 - protein, 12 aa, Artificial Sequence
  Description of Artificial Sequence: Synthetic peptide
QSVLYSANHKNY

SEQ ID NO: 403 - protein, 3 aa, Artificial Sequence
  Description of Artificial Sequence: Synthetic peptide
WAS

SEQ ID NO: 404 - protein, 8 aa, Artificial Sequence
  Description of Artificial Sequence: Synthetic peptide
HQYLSSWT

SEQ ID NO: 405 - protein, 116 aa, Artificial Sequence
  Description of Artificial Sequence: Synthetic polypeptide
QVQLQESGAELSKPGASVKMSCKASGYTFTSYWLHWIKQRPGQGLEWIGYINPRNDYTEYNQNFKDKATLTADKSSSTAYMQLSSLTSEDSAVYYCARRDITTFYWGQGTTLTVSS

SEQ ID NO: 406 - protein, 8 aa, Artificial Sequence
  Description of Artificial Sequence: Synthetic peptide
GYTFTSYW

SEQ ID NO: 407 - protein, 8 aa, Artificial Sequence
  Description of Artificial Sequence: Synthetic peptide
INPRNDYT

SEQ ID NO: 408 - protein, 9 aa, Artificial Sequence
  Description of Artificial Sequence: Synthetic peptide
ARRDITTFY

SEQ ID NO: 409 - protein, 107 aa, Artificial Sequence [sequence omitted]

SEQ ID NO: 410 - protein, 6 aa, Artificial Sequence
  Description of Artificial Sequence: Synthetic peptide
QGIRND

SEQ ID NO: 411 - protein, 3 aa, Artificial Sequence
  Description of Artificial Sequence: Synthetic peptide
AAS

SEQ ID NO: 412 - protein, 9 aa, Artificial Sequence
  Description of Artificial Sequence: Synthetic peptide
LQHNSYPCS

SEQ ID NO: 413 - protein, 125 aa, Artificial Sequence [sequence omitted]

SEQ ID NO: 414 - protein, 8 aa, Artificial Sequence
  Description of Artificial Sequence: Synthetic peptide
GFTFSSYA

SEQ ID NO: 415 - protein, 8 aa, Artificial Sequence
  Description of Artificial Sequence: Synthetic peptide
ISGSGGTT

SEQ ID NO: 416 - protein, 18 aa, Artificial Sequence
  Description of Artificial Sequence: Synthetic peptide
AKDLGWSDSYYYYYGMDV

SEQ ID NO: 417 - protein, 107 aa, Artificial Sequence
  Description of Artificial Sequence: Synthetic polypeptide
DIQMTQSPSSLSASLGDRVTITCRASQGISSYLAWYQQKPGKAPKLLIYAKSTLQSGVPSRFSGSGSGTDFTLTISSLQPEDSATYYCQQYWTFPLTFGGGTKVEIK

SEQ ID NO: 418 - protein, 6 aa, Artificial Sequence
  Description of Artificial Sequence: Synthetic peptide
QGISSY

SEQ ID NO: 419 - protein, 3 aa, Artificial Sequence
  Description of Artificial Sequence: Synthetic peptide
AKS

SEQ ID NO: 420 - protein, 9 aa, Artificial Sequence
  Description of Artificial Sequence: Synthetic peptide
QQYWTFPLT

SEQ ID NO: 421 - protein, 122 aa, Artificial Sequence
  Description of Artificial Sequence: Synthetic polypeptide
EVQLLQSGGGLVQPGGSLRLSCAASGFMFSRYPMHWVRQAPGKGLEWVGSISGSGGATPYADSVKGRFTISRDNSKNTLYLQMNSLRAEDTAVYYCAKDFYQILTGNAFDYWGQGTTVTVSS

SEQ ID NO: 422 - protein, 8 aa, Artificial Sequence
  Description of Artificial Sequence: Synthetic peptide
GFMFSRYP

SEQ ID NO: 423 - protein, 8 aa, Artificial Sequence
  Description of Artificial Sequence: Synthetic peptide
ISGSGGAT

SEQ ID NO: 424 - protein, 15 aa, Artificial Sequence
  Description of Artificial Sequence: Synthetic peptide
AKDFYQILTGNAFDY

SEQ ID NO: 425 - protein, 106 aa, Artificial Sequence
  Description of Artificial Sequence: Synthetic polypeptide
QIVLTQSPAIMSASPGEKVTITCSASSSVSYIHWFQQKPGTSPKVWIYGTSNLASGVPARFTGSGSGTSYSLTISRMEAEDAATYYCQQRSSYPFTFGSGTKLEIK

SEQ ID NO: 426 - protein, 5 aa, Artificial Sequence
  Description of Artificial Sequence: Synthetic peptide
SSVSY

SEQ ID NO: 427 - protein, 3 aa, Artificial Sequence
  Description of Artificial Sequence: Synthetic peptide
GTS

SEQ ID NO: 428 - protein, 9 aa, Artificial Sequence
  Description of Artificial Sequence: Synthetic peptide
QQRSSYPFT

SEQ ID NO: 429 - protein, 123 aa, Artificial Sequence
  Description of Artificial Sequence: Synthetic polypeptide
EVQLQQSGPELVKPGSSVKISCKASGYSFTAYYMHWVKQSHGKSLEQISGRINPDNGGNSYNQFKFGKAILTVDKSSNTAYMELRSLTSEDSAVYYCAKSTSYDYDGYWFDVWGAGTTVTVSS

SEQ ID NO: 430 - protein, 8 aa, Artificial Sequence
  Description of Artificial Sequence: Synthetic peptide
GYSFTAYY

SEQ ID NO: 431 - protein, 8 aa, Artificial Sequence
  Description of Artificial Sequence: Synthetic peptide
RINPDNGG

SEQ ID NO: 432 - protein, 16 aa, Artificial Sequence
  Description of Artificial Sequence: Synthetic peptide
CAKSTSYDYDGYWFDV

SEQ ID NO: 433 - protein, 108 aa, Artificial Sequence
  Description of Artificial Sequence: Synthetic polypeptide
SSELTQDPAVSVALGQTVRITCQGDSLRSYYATWYQQKPGQAPILVIYGENKRPSGIPDRFSGSSSGNTASLTITGAQAEDEADYYCKSRDGSGQHLVFGGGTKLTVL

SEQ ID NO: 434 - protein, 6 aa, Artificial Sequence
  Description of Artificial Sequence: Synthetic peptide
SLRSYY

SEQ ID NO: 435 - protein, 3 aa, Artificial Sequence
  Description of Artificial Sequence: Synthetic peptide
GEN

SEQ ID NO: 436 - protein, 11 aa, Artificial Sequence
  Description of Artificial Sequence: Synthetic peptide
KSRDGSGQHLV

SEQ ID NO: 437 - protein, 130 aa, Artificial Sequence
  Description of Artificial Sequence: Synthetic polypeptide
EVQLVQSGAEVKKPGSSVKVSCKASGGTFSSYAISWVRQAPGQGLEWMGGIIPIFGTANYAQKFQGRVTITADKSTSTAYMELSSLRSEDTAVYYCARAPLRFLEWSTQDHYYYYYMDVWGKGTTVTVSS

SEQ ID NO: 438 - protein, 8 aa, Artificial Sequence
  Description of Artificial Sequence: Synthetic peptide
GGTFSSYA

SEQ ID NO: 439 - protein, 8 aa, Artificial Sequence
  Description of Artificial Sequence: Synthetic peptide
IIPIFGTA

SEQ ID NO: 440 - protein, 23 aa, Artificial Sequence
  Description of Artificial Sequence: Synthetic peptide
ARAPLRFLEWSTQDHYYYYYMDV

SEQ ID NO: 441 - protein, 107 aa, Artificial Sequence [sequence omitted]

SEQ ID NO: 442 - protein, 6 aa, Artificial Sequence
  Description of Artificial Sequence: Synthetic peptide
QSIGSS

SEQ ID NO: 443 - protein, 3 aa, Artificial Sequence
  Description of Artificial Sequence: Synthetic peptide
YAS

SEQ ID NO: 444 - protein, 9 aa, Artificial Sequence
  Description of Artificial Sequence: Synthetic peptide
HQSSRLPHT

SEQ ID NO: 445 - protein, 118 aa, Artificial Sequence [sequence omitted]

SEQ ID NO: 446 - protein, 8 aa, Artificial Sequence
  Description of Artificial Sequence: Synthetic peptide
GFTFSSFA

SEQ ID NO: 447 - protein, 7 aa, Artificial Sequence
  Description of Artificial Sequence: Synthetic peptide
IDTRGAT

SEQ ID NO: 448 - protein, 12 aa, Artificial Sequence
  Description of Artificial Sequence: Synthetic peptide
ARLGNFYYGMDV

SEQ ID NO: 449 - protein, 108 aa, Artificial Sequence
  Description of Artificial Sequence: Synthetic polypeptide
EIVLTQSPATLSLSPGERATLSCRASQSVSSYLAWYQQKPGQAPRLLIYDASKRATGIPARFSGSGSGTDFTLTISSLEPEDFAVYYCQQRSKWPPWTFGQGTKVESK

SEQ ID NO: 450 - protein, 6 aa, Artificial Sequence
  Description of Artificial Sequence: Synthetic peptide
QSVSSY

SEQ ID NO: 451 - protein, 3 aa, Artificial Sequence
  Description of Artificial Sequence: Synthetic peptide
DAS

SEQ ID NO: 452 - protein, 10 aa, Artificial Sequence
  Description of Artificial Sequence: Synthetic peptide
QQRSKWPPWT

SEQ ID NO: 453 - protein, 118 aa, Artificial Sequence
  Description of Artificial Sequence: Synthetic polypeptide
QVELVESGGGVVQPGRSQRLSCAASGFTFSSYGMHWVRQAPGKGLEWVAIIWFDGSSTYYADSVRGRFTISRDNSKNTLYLQMNSLRAEDTAVYFCARELGRRYFDLWGRGTLVSVSS

SEQ ID NO: 454 - protein, 8 aa, Artificial Sequence
  Description of Artificial Sequence: Synthetic peptide
GFTFSSYG

SEQ ID NO: 455 - protein, 8 aa, Artificial Sequence
  Description of Artificial Sequence: Synthetic peptide
IWFDGSST

SEQ ID NO: 456 - protein, 11 aa, Artificial Sequence
  Description of Artificial Sequence: Synthetic peptide
ARELGRRYFDL

SEQ ID NO: 457 - protein, 112 aa, Artificial Sequence [sequence omitted]

SEQ ID NO: 458 - protein, 11 aa, Artificial Sequence
  Description of Artificial Sequence: Synthetic peptide
QSIVHSNGNTY

SEQ ID NO: 459 - protein, 3 aa, Artificial Sequence
  Description of Artificial Sequence: Synthetic peptide
KVS

SEQ ID NO: 460 - protein, 9 aa, Artificial Sequence
  Description of Artificial Sequence: Synthetic peptide
FQGSHVPWT

SEQ ID NO: 461 - protein, 117 aa, Artificial Sequence [sequence omitted]

SEQ ID NO: 462 - protein, 9 aa, Artificial Sequence
  Description of Artificial Sequence: Synthetic peptide
GYSITGGYL

SEQ ID NO: 463 - protein, 7 aa, Artificial Sequence
  Description of Artificial Sequence: Synthetic peptide
ISYDGTN

SEQ ID NO: 464 - protein, 10 aa, Artificial Sequence
  Description of Artificial Sequence: Synthetic peptide
ARYGRVFFDY

SEQ ID NO: 465 - protein, 112 aa, Artificial Sequence [sequence omitted]

SEQ ID NO: 466 - protein, 11 aa, Artificial Sequence
  Description of Artificial Sequence: Synthetic peptide
QSLLHSNGYNY

SEQ ID NO: 467 - protein, 3 aa, Artificial Sequence
  Description of Artificial Sequence: Synthetic peptide
LGS

SEQ ID NO: 468 - protein, 9 aa, Artificial Sequence
  Description of Artificial Sequence: Synthetic peptide
MQGTHWPLT

SEQ ID NO: 469 - protein, 119 aa, Artificial Sequence [sequence omitted]

SEQ ID NO: 470 - protein, 9 aa, Artificial Sequence
  Description of Artificial Sequence: Synthetic peptide
GGSISSSNW

SEQ ID NO: 471 - protein, 7 aa, Artificial Sequence
  Description of Artificial Sequence: Synthetic peptide
IYHSGST

SEQ ID NO: 472 - protein, 12 aa, Artificial Sequence
  Description of Artificial Sequence: Synthetic peptide
ARWTGRTDAFDI

SEQ ID NO: 473 - protein, 107 aa, Artificial Sequence
  Description of Artificial Sequence: Synthetic polypeptide
EIVLTQSPATLSLSPGERATLSCRASQSISSYLAWYQQKPGQAPRLLIYDASNRATGIPARFSGSGSGTDFTLTISSLEPEDFAVYYCQQRSNWPLTFGQGTNLEIK

SEQ ID NO: 474 - protein, 6 aa, Artificial Sequence
  Description of Artificial Sequence: Synthetic peptide
QSISSY

SEQ ID NO: 475 - protein, 3 aa, Artificial Sequence
  Description of Artificial Sequence: Synthetic peptide
DAS

SEQ ID NO: 476 - protein, 9 aa, Artificial Sequence
  Description of Artificial Sequence: Synthetic peptide
QQRSNWPLT

SEQ ID NO: 477 - protein, 120 aa, Artificial Sequence
  Description of Artificial Sequence: Synthetic polypeptide
QVQLQQWGAGLLKPSETLSLTCAVYGGSFSDYYWNWIRQPPGKGLEWIGEINHRGSTNSNPSLKSRVTLSLDTSKNQFSLKLRSVTAADTAVYYCAFGYSDYEYNWFDPWGQGTLVTVSS

SEQ ID NO: 478 - protein, 8 aa, Artificial Sequence
  Description of Artificial Sequence: Synthetic peptide
GGSFSDYY

SEQ ID NO: 479 - protein, 7 aa, Artificial Sequence
  Description of Artificial Sequence: Synthetic peptide
INHRGST

SEQ ID NO: 480 - protein, 14 aa, Artificial Sequence
  Description of Artificial Sequence: Synthetic peptide
AFGYSDYEYNWFDP

SEQ ID NO: 481 - protein, 108 aa, Artificial Sequence
  Description of Artificial Sequence: Synthetic polypeptide
DIQMTQSPSSLSASVGDRVTITCRASQNVGTAVAWLQQTPGKAPKLLIYSASNRYTGVPSRFSGSGSGTDYTFTISSLQPEDIATYYCQQYTNYPMYTFGQGTKVQIK

SEQ ID NO: 482 - protein, 6 aa, Artificial Sequence
  Description of Artificial Sequence: Synthetic peptide
QNVGTA

SEQ ID NO: 483 - protein, 3 aa, Artificial Sequence
  Description of Artificial Sequence: Synthetic peptide
SAS

SEQ ID NO: 484 - protein, 10 aa, Artificial Sequence
  Description of Artificial Sequence: Synthetic peptide
QQYTNYPMYT

SEQ ID NO: 485 - protein, 124 aa, Artificial Sequence
  Description of Artificial Sequence: Synthetic polypeptide
QVQLQESGPGLVRPSQTLSLTCTASGYTFTDYVIHWVKQPPGRGLEWIGYINPYDDDTTYNQKFKGRVTMLVDTSSNTAYLRLSSVTAEDTAVYYCARRGNSYDGYFDYSMDYWGSGTPVTVSS

SEQ ID NO: 486 - protein, 8 aa, Artificial Sequence
  Description of Artificial Sequence: Synthetic peptide
GYTFTDYV

SEQ ID NO: 487 - protein, 8 aa, Artificial Sequence
  Description of Artificial Sequence: Synthetic peptide
INPYDDDT

SEQ ID NO: 488 - protein, 17 aa, Artificial Sequence
  Description of Artificial Sequence: Synthetic peptide
ARRGNSYDGYFDYSMDY

SEQ ID NO: 489 - protein, 104 aa, Artificial Sequence [sequence omitted]

SEQ ID NO: 490 - protein, 5 aa, Artificial Sequence
  Description of Artificial Sequence: Synthetic peptide
SSRSY

SEQ ID NO: 491 - protein, 3 aa, Artificial Sequence
  Description of Artificial Sequence: Synthetic peptide
DTS

SEQ ID NO: 492 - protein, 7 aa, Artificial Sequence
  Description of Artificial Sequence: Synthetic peptide
HQRSSYT

SEQ ID NO: 493 - protein, 115 aa, Artificial Sequence
  Description of Artificial Sequence: Synthetic polypeptide
QLQQSGTVLARPGASVKMSCKASGYSFTRYWMHWIKQRPGQGLEWIGAIYPGNSDTSYNQKFEGKAKLTAVTSASTAYMELSSLTHEDSAVYYCSRDYGYYFDFWGQGTTLTVSS

SEQ ID NO: 494 - protein, 8 aa, Artificial Sequence
  Description of Artificial Sequence: Synthetic peptide
GYSFTRYW

SEQ ID NO: 495 - protein, 8 aa, Artificial Sequence
  Description of Artificial Sequence: Synthetic peptide
IYPGNSDT

SEQ ID NO: 496 - protein, 10 aa, Artificial Sequence
  Description of Artificial Sequence: Synthetic peptide
SRDYGYYFDF

SEQ ID NO: 497 - protein, 106 aa, Artificial Sequence
  Description of Artificial Sequence: Synthetic polypeptide
DIQMTQSPSTLSASVGDRVTITCSASSSISYMHWYQQKPGKAPKLLIYTTSNLASGVPARFSGSGSGTEFTLTISSLQPDDFATYYCHQRSTYPLTFGQGTKVEVK

SEQ ID NO: 498 - protein, 5 aa, Artificial Sequence
  Description of Artificial Sequence: Synthetic peptide
SSISY

SEQ ID NO: 499 - protein, 3 aa, Artificial Sequence
  Description of Artificial Sequence: Synthetic peptide
TTS

SEQ ID NO: 500 - protein, 9 aa, Artificial Sequence
  Description of Artificial Sequence: Synthetic peptide
HQRSTYPLT

SEQ ID NO: 501 - protein, 116 aa, Artificial Sequence
  Description of Artificial Sequence: Synthetic polypeptide
QVQLVQSGAEVKKPGSSVKVSCKASGYTFTSYRMHWVRQAPGQGLEWIGYINPSTGYTEYNQKFKDKATITADESTNTAYMELSSLRSEDTAVYYCARGGGVFDYWGQGTLVTVSS

SEQ ID NO: 502 - protein, 8 aa, Artificial Sequence
  Description of Artificial Sequence: Synthetic peptide
GYTFTSYR

SEQ ID NO: 503 - protein, 8 aa, Artificial Sequence
  Description of Artificial Sequence: Synthetic peptide
INPSTGYT

SEQ ID NO: 504 - protein, 10 aa, Artificial Sequence
  Description of Artificial Sequence: Synthetic peptide
ARGGGVFDYW

SEQ ID NO: 505 - protein, 107 aa, Artificial Sequence
  Description of Artificial Sequence: Synthetic polypeptide
DIQMTQSPSSLSASVGDRVTITCRASQDISNYLNWYQQKPGKAPKLLIYYTSKLHSGVPSRFSGSGSGTDYTLTISSLQPEDFATYYCQQGSALPWTFGQGTKVEIK

SEQ ID NO: 506 - protein, 6 aa, Artificial Sequence
  Description of Artificial Sequence: Synthetic peptide
QDISNY

SEQ ID NO: 507 - protein, 3 aa, Artificial Sequence
  Description of Artificial Sequence: Synthetic peptide
YTS

SEQ ID NO: 508 - protein, 9 aa, Artificial Sequence
  Description of Artificial Sequence: Synthetic peptide
QQGSALPWT

SEQ ID NO: 509 - protein, 121 aa, Artificial Sequence
  Description of Artificial Sequence: Synthetic polypeptide
QVQLQESGPGLVKPSQTLSLTCAVYGGSFSSGYWNWIRKHPGKGLEYIGYISYNGITYHNPSLKSRITINRDTSKNQYSLQLNSVTPEDTAVYYCARYKYDYDGGHAMDYWGQGTLVTVSS

SEQ ID NO: 510 - protein, 8 aa, Artificial Sequence
  Description of Artificial Sequence: Synthetic peptide
GGSFSSGY

SEQ ID NO: 511 - protein, 7 aa, Artificial Sequence
  Description of Artificial Sequence: Synthetic peptide
ISYNGIT

SEQ ID NO: 512 - protein, 15 aa, Artificial Sequence
  Description of Artificial Sequence: Synthetic peptide
ARYKYDYDGGHAMDY

SEQ ID NO: 513 - protein, 108 aa, Artificial Sequence
  Description of Artificial Sequence: Synthetic polypeptide
EIVLTQSPGTLSLSPGERATLSCRASQSVRGRYLAWYQQKPGQAPRLLIYGASSRATGIPDRFSGSGSGTDFTLTISRLEPEDFAVFYCQQYGSSPRTFGQGTKVEIK

SEQ ID NO: 514 - protein, 7 aa, Artificial Sequence
  Description of Artificial Sequence: Synthetic peptide
QSVRGRY

SEQ ID NO: 515 - protein, 3 aa, Artificial Sequence
  Description of Artificial Sequence: Synthetic peptide
GAS

SEQ ID NO: 516 - protein, 9 aa, Artificial Sequence
  Description of Artificial Sequence: Synthetic peptide
QQYGSSPRT

SEQ ID NO: 517 - protein, 122 aa, Artificial Sequence
  Description of Artificial Sequence: Synthetic polypeptide
EVQLLESGGGLVQPGGSLRLSCAASGFTFSSYAMSWVRQAPGKGLEWVSGITGSGGSTYYADSVKGRFTISRDNSKNTLYLQMNSLRAEDTAVYYCAKDPGTTVIMSWFDPWGQGTLVTVSS

SEQ ID NO: 518 - protein, 8 aa, Artificial Sequence
  Description of Artificial Sequence: Synthetic peptide
GFTFSSYA

SEQ ID NO: 519 - protein, 8 aa, Artificial Sequence
  Description of Artificial Sequence: Synthetic peptide
ITGSGGST

SEQ ID NO: 520 - protein, 15 aa, Artificial Sequence
  Description of Artificial Sequence: Synthetic peptide
AKDPGTTVIMSWFDP

SEQ ID NO: 521 - protein, 107 aa, Artificial Sequence [sequence omitted]

SEQ ID NO: 522 - protein, 6 aa, Artificial Sequence
  Description of Artificial Sequence: Synthetic peptide
QSVSRY

SEQ ID NO: 523 - protein, 3 aa, Artificial Sequence
  Description of Artificial Sequence: Synthetic peptide
DAS

SEQ ID NO: 524 - protein, 9 aa, Artificial Sequence
  Description of Artificial Sequence: Synthetic peptide
QQRSNWPRT

SEQ ID NO: 525 - protein, 123 aa, Artificial Sequence [sequence omitted]

SEQ ID NO: 526 - protein, 8 aa, Artificial Sequence
  Description of Artificial Sequence: Synthetic peptide
GGSFSGYY

SEQ ID NO: 527 - protein, 7 aa, Artificial Sequence
  Description of Artificial Sequence: Synthetic peptide
INHSGST

SEQ ID NO: 528 - protein, 17 aa, Artificial Sequence
  Description of Artificial Sequence: Synthetic peptide
ARGYYDILTGYYYYFDY

SEQ ID NO: 529 - protein, 105 aa, Artificial Sequence
  Description of Artificial Sequence: Synthetic polypeptide
SSELTQDPAVSVALGQTVRVTCQGDSLRSYYASQYQQKPGQAPVLVIYGKNNRPSGIPDRFSGSSSGNTASLTITGAQAEDEADYYCSSRDSSGNHWVFGGGTEL

SEQ ID NO: 530 - protein, 6 aa, Artificial Sequence
  Description of Artificial Sequence: Synthetic peptide
SLRSYY

SEQ ID NO: 531 - protein, 3 aa, Artificial Sequence
  Description of Artificial Sequence: Synthetic peptide
GKN

SEQ ID NO: 532 - protein, 11 aa, Artificial Sequence
  Description of Artificial Sequence: Synthetic peptide
SSRDSSGNHWV

SEQ ID NO: 533 - protein, 123 aa, Artificial Sequence
  Description of Artificial Sequence: Synthetic polypeptide
QVQLQQSGAEVKKPGSSVRVSCKASGGTFNNNAINWVRQAPGQGLEWMGGIIPMFGTAKYSQNFQGRVAITADESTGTASMELSSLRSEDTAVYYCARSRDLLLFPHHALSPWGRGTMVTVSS

SEQ ID NO: 534 - protein, 8 aa, Artificial Sequence
  Description of Artificial Sequence: Synthetic peptide
GGTFNNNA

SEQ ID NO: 535 - protein, 8 aa, Artificial Sequence
  Description of Artificial Sequence: Synthetic peptide
IIPMFGTA

SEQ ID NO: 536 - protein, 16 aa, Artificial Sequence
  Description of Artificial Sequence: Synthetic peptide
ARSRDLLLFPHHALSP

SEQ ID NO: 537 - protein, 106 aa, Artificial Sequence
  Description of Artificial Sequence: Synthetic polypeptide
QIVLTQSPAIMSASPGEKVTITCSASSSVSYMNWFQQKPGTSPKLWIYSTSNLASGVPARFSGSGSGTSYSLTISRMEAEDAATYYCQQRSSYPNTFGGGTKLEIK

SEQ ID NO: 538 - protein, 5 aa, Artificial Sequence
  Description of Artificial Sequence: Synthetic peptide
SSVSY

SEQ ID NO: 539 - protein, 3 aa, Artificial Sequence
  Description of Artificial Sequence: Synthetic peptide
STS

SEQ ID NO: 540 - protein, 9 aa, Artificial Sequence
  Description of Artificial Sequence: Synthetic peptide
QQRSSYPNT

SEQ ID NO: 541 - protein, 120 aa, Artificial Sequence
  Description of Artificial Sequence: Synthetic polypeptide
QVQLQQSGAELVKPGASVKLSCKASGYTFRSYDINWVRQRPEQGLEWIGWIFPGDGSTKYNEKFKGKATLTTDKSSSTAYMQLSRLTSEDSAVYFCARWTVVGPGYFDVWGAGTTVTVSS

SEQ ID NO: 542 - protein, 8 aa, Artificial Sequence
  Description of Artificial Sequence: Synthetic peptide
GYTFRSYD

SEQ ID NO: 543 - protein, 8 aa, Artificial Sequence
  Description of Artificial Sequence: Synthetic peptide
IFPGDGST

SEQ ID NO: 544 - protein, 13 aa, Artificial Sequence
  Description of Artificial Sequence: Synthetic peptide
ARWTVVGPGYFDV

SEQ ID NO: 545 - protein, 106 aa, Artificial Sequence [sequence omitted]

SEQ ID NO: 546 - protein, 6 aa, Artificial Sequence
  Description of Artificial Sequence: Synthetic peptide
QDVGTA

SEQ ID NO: 547 - protein, 3 aa, Artificial Sequence
  Description of Artificial Sequence: Synthetic peptide
WAS

SEQ ID NO: 548 - protein, 8 aa, Artificial Sequence
  Description of Artificial Sequence: Synthetic peptide
QQYSSYRT

SEQ ID NO: 549 - protein, 119 aa, Artificial Sequence [sequence omitted]

SEQ ID NO: 550 - protein, 8 aa, Artificial Sequence
  Description of Artificial Sequence: Synthetic peptide
GFTFSSYV

SEQ ID NO: 551 - protein, 8 aa, Artificial Sequence
  Description of Artificial Sequence: Synthetic peptide
ISSGGSYT

SEQ ID NO: 552 - protein, 13 aa, Artificial Sequence
  Description of Artificial Sequence: Synthetic peptide
ARRGDSMITTDYW

SEQ ID NO: 553 - protein, 108 aa, Artificial Sequence
  Description of Artificial Sequence: Synthetic polypeptide
SSELTQDPAVSVALGQTVRITCQGDSLRSYYASWYQQKPGQAPVLVIYGKNNRPSGIPDRFSGSSSGNTASLTITGAQAEDEADYYCNSRDSSGNHVVFGGGTKLTVL

SEQ ID NO: 554 - protein, 6 aa, Artificial Sequence
  Description of Artificial Sequence: Synthetic peptide
SLRSYY

SEQ ID NO: 555 - protein, 3 aa, Artificial Sequence
  Description of Artificial Sequence: Synthetic peptide
GKN

SEQ ID NO: 556 - protein, 11 aa, Artificial Sequence
  Description of Artificial Sequence: Synthetic peptide
NSRDSSGNHVV

SEQ ID NO: 557 - protein, 121 aa, Artificial Sequence
  Description of Artificial Sequence: Synthetic polypeptide
EVQLVQSGGGVERPGGSLRLSCAASGFTFDDYGMSWVRQAPGKGLEWVSGINWNGGSTGYADSVKGRVTISRDNAKNSLYLQMNSLRAEDTAVYYCAKILGAGRGWYFDLWGKGTTVTVSS

SEQ ID NO: 558 - protein, 8 aa, Artificial Sequence
  Description of Artificial Sequence: Synthetic peptide
GFTFDDYG

SEQ ID NO: 559 - protein, 8 aa, Artificial Sequence
  Description of Artificial Sequence: Synthetic peptide
INWNGGST

SEQ ID NO: 560 - protein, 14 aa, Artificial Sequence
  Description of Artificial Sequence: Synthetic peptide
AKILGAGRGWYFDL

SEQ ID NO: 561 - protein, 108 aa, Artificial Sequence
  Description of Artificial Sequence: Synthetic polypeptide
EIVLTQSPGTLSLSPGERATLSCRASQGISRSYLAWYQQKPGQAPSLLIYGASSRATGIPDRFSGSGSGTDFTLTISRLEPEDFAVYYCQQFGSSPWTFGQGTKVEIK

SEQ ID NO: 562 - protein, 7 aa, Artificial Sequence
  Description of Artificial Sequence: Synthetic peptide
QGISRSY

SEQ ID NO: 563 - protein, 3 aa, Artificial Sequence
  Description of Artificial Sequence: Synthetic peptide
GAS

SEQ ID NO: 564 - protein, 9 aa, Artificial Sequence
  Description of Artificial Sequence: Synthetic peptide
QQFGSSPWT

SEQ ID NO: 565 - protein, 122 aa, Artificial Sequence
  Description of Artificial Sequence: Synthetic polypeptide
QVQLQESGPGLVKPSQTLSLTCTVSGGSISSGDYFWSWIRQLPGKGLEWIGHIHNSGTTYYNPSLKSRVTISVDTSKKQFSLRLSSVTAADTAVYYCARDRGGDYYYGMDVWGQGTTVTVSS

SEQ ID NO: 566 - protein, 10 aa, Artificial Sequence
  Description of Artificial Sequence: Synthetic peptide
GGSISSGDYF

SEQ ID NO: 567 - protein, 7 aa, Artificial Sequence
  Description of Artificial Sequence: Synthetic peptide
IHNSGTT

SEQ ID NO: 568 - protein, 14 aa, Artificial Sequence
  Description of Artificial Sequence: Synthetic peptide
ARDRGGDYYYGMDV

SEQ ID NO: 569 - protein, 107 aa, Artificial Sequence
  Description of Artificial Sequence: Synthetic polypeptide
DIQMTQSPSSLSASVGDRVTITCRASQGISRWLAWYQQKPEKAPKSLIYAASSLQSGVPSRFSGSGSGTDFTLTISSLQPEDFATYYCQQYNTYPRTFGQGTKVEIK

SEQ ID NO: 570 - protein, 6 aa, Artificial Sequence
  Description of Artificial Sequence: Synthetic peptide
QGISRW

SEQ ID NO: 571 - protein, 3 aa, Artificial Sequence
  Description of Artificial Sequence: Synthetic peptide
AAS

SEQ ID NO: 572 - protein, 9 aa, Artificial Sequence
  Description of Artificial Sequence: Synthetic peptide
QQYNTYPRT

SEQ ID NO: 573 - protein, 119 aa, Artificial Sequence
  Description of Artificial Sequence: Synthetic polypeptide
QVQLVESGGGVVQPGRSLRLSCAASGFTFSSYDMHWVRQAPGKGLEWVAVIWYDGSNKYYADSVKGRFTISRDNSKNTLYLQMNSLRAEDTAVYYCARGSGNWGFFDYWGQGTLVTVSS

SEQ ID NO: 574 - protein, 8 aa, Artificial Sequence
  Description of Artificial Sequence: Synthetic peptide
GFTFSSYD

SEQ ID NO: 575 - protein, 8 aa, Artificial Sequence
  Description of Artificial Sequence: Synthetic peptide
IWYDGSNK

SEQ ID NO: 576 - protein, 12 aa, Artificial Sequence
  Description of Artificial Sequence: Synthetic peptide
ARGSGNWGFFDY

SEQ ID NO: 577 - protein, 110 aa, Artificial Sequence
  Description of Artificial Sequence: Synthetic polypeptide
QSALTQPASVSGSPGQSITISCTGTSSDVGGYNYVSWYQQHPGKAPKLMIYDVSNRPSGVSNRFSGSKSGNTASLTISGLQAEDEADYYCSSYTSSSTRVFGTGTKVTVL

SEQ ID NO: 578 - protein, 9 aa, Artificial Sequence
  Description of Artificial Sequence: Synthetic peptide
SSDVGGYNY

SEQ ID NO: 579 - protein, 3 aa, Artificial Sequence
  Description of Artificial Sequence: Synthetic peptide
DVS

SEQ ID NO: 580 - protein, 10 aa, Artificial Sequence
  Description of Artificial Sequence: Synthetic peptide
SSYTSSSTRV

SEQ ID NO: 581 - protein, 120 aa, Artificial Sequence
  Description of Artificial Sequence: Synthetic polypeptide
EVQLLESGGGLVQPGGSLRLSCAASGFTFSSYIMMWVRQAPGKGLEWVSSIYPSGGITFYADTVKGRFTISRDNSKNTLYLQMNSLRAEDTAVYYCARIKLGTVTTVDYWGQGTLVTVSS

SEQ ID NO: 582 - protein, 8 aa, Artificial Sequence
  Description of Artificial Sequence: Synthetic peptide
GFTFSSYI

SEQ ID NO: 583 - protein, 8 aa, Artificial Sequence
  Description of Artificial Sequence: Synthetic peptide
IYPSGGIT

SEQ ID NO: 584 - protein, 13 aa, Artificial Sequence
  Description of Artificial Sequence: Synthetic peptide
ARIKLGTVTTVDY

SEQ ID NO: 585 - protein, 107 aa, Artificial Sequence [sequence omitted]

SEQ ID NO: 586 - protein, 6 aa, Artificial Sequence
  Description of Artificial Sequence: Synthetic peptide
QDVSTA

SEQ ID NO: 587 - protein, 3 aa, Artificial Sequence
  Description of Artificial Sequence: Synthetic peptide
SAS

SEQ ID NO: 588 - protein, 9 aa, Artificial Sequence
  Description of Artificial Sequence: Synthetic peptide
QQYLYHPAT

SEQ ID NO: 589 - protein, 118 aa, Artificial Sequence [sequence omitted]

SEQ ID NO: 590 - protein, 8 aa, Artificial Sequence
  Description of Artificial Sequence: Synthetic peptide
GFTFSDSW

SEQ ID NO: 591 - protein, 8 aa, Artificial Sequence
  Description of Artificial Sequence: Synthetic peptide
ISPYGGST

SEQ ID NO: 592 - protein, 11 aa, Artificial Sequence
  Description of Artificial Sequence: Synthetic peptide
ARRHWPGGFDY

SEQ ID NO: 593 - protein, 108 aa, Artificial Sequence
  Description of Artificial Sequence: Synthetic polypeptide
EIVLTQSPGTLSLSPGERATLSCRASQRVSSSYLAWYQQKPGQAPRLLIYDASSRATGIPDRFSGSGSGTDFTLTISRLEPEDFAVYYCQQYGSLPWTFGQGTKVEIK

SEQ ID NO: 594 - protein, 7 aa, Artificial Sequence
  Description of Artificial Sequence: Synthetic peptide
QRVSSSY

SEQ ID NO: 595 - protein, 3 aa, Artificial Sequence
  Description of Artificial Sequence: Synthetic peptide
DAS

SEQ ID NO: 596 - protein, 9 aa, Artificial Sequence
  Description of Artificial Sequence: Synthetic peptide
QQYGSLPWT

SEQ ID NO: 597 - protein, 121 aa, Artificial Sequence
  Description of Artificial Sequence: Synthetic polypeptide
EVQLVESGGGLVQPGGSLRLSCAASGFTFSRYWMSWVRQAPGKGLEWVANIKQDGSEKYYVDSVKGRFTISRDNAKNSLYLQMNSLRAEDTAVYYCAREGGWFGELAFDYWGQGTLVTVSS

SEQ ID NO: 598 - protein, 8 aa, Artificial Sequence
  Description of Artificial Sequence: Synthetic peptide
GFTFSRYW

SEQ ID NO: 599 - protein, 8 aa, Artificial Sequence
  Description of Artificial Sequence: Synthetic peptide
IKQDGSEK

SEQ ID NO: 600 - protein, 14 aa, Artificial Sequence
  Description of Artificial Sequence: Synthetic peptide
AREGGWFGELAFDY

SEQ ID NO: 601 - protein, 107 aa, Artificial Sequence
  Description of Artificial Sequence: Synthetic polypeptide
DIQMTQSPSSLSASVGDRVTITCRASQGISNWLAWYQQKPEKAPKSLIYAASSLQSGVPSRFSGSGSGTDFTLTISSLQPEDFATYYCQQYDSYPRTFGQGTKVEIK

SEQ ID NO: 602 - protein, 6 aa, Artificial Sequence
  Description of Artificial Sequence: Synthetic peptide
QGISNW

SEQ ID NO: 603 - protein, 3 aa, Artificial Sequence
  Description of Artificial Sequence: Synthetic peptide
AAS

SEQ ID NO: 604 - protein, 9 aa, Artificial Sequence
  Description of Artificial Sequence: Synthetic peptide
QQYDSYPRT

SEQ ID NO: 605 - protein, 121 aa, Artificial Sequence
  Description of Artificial Sequence: Synthetic polypeptide
EVQLVESGGGLVQPGGSLRLSCAASGFTFSSYWMSWVRQAPGKGLEWVAYIKQDGNEKYYVDSVKGRFTISRDNAKNSLYLQMNSLRAEDTAVYYCAREGILWFGDLPTFWGQGTLVTVSS

SEQ ID NO: 606 - protein, 8 aa, Artificial Sequence
  Description of Artificial Sequence: Synthetic peptide
GFTFSSYW

SEQ ID NO: 607 - protein, 8 aa, Artificial Sequence
  Description of Artificial Sequence: Synthetic peptide
IKQDGNEK

SEQ ID NO: 608 - protein, 14 aa, Artificial Sequence
  Description of Artificial Sequence: Synthetic peptide
AREGILWFGDLPTF

SEQ ID NO: 609 - protein, 107 aa, Artificial Sequence
  Description of Artificial Sequence: Synthetic polypeptide
DIQLTQSPSFLSASVGDRVTITCKASQNVDTNVAWYQQKPGKAPKALIYSASYRYSGVPSRFSGSGSGTDFTLTISSLQPEDFATYYCQQYNNYPFTFGQGTKLEIK

SEQ ID NO: 610 - protein, 6 aa, Artificial Sequence
  Description of Artificial Sequence: Synthetic peptide
QNVDTN

SEQ ID NO: 611 - protein, 3 aa, Artificial Sequence
  Description of Artificial Sequence: Synthetic peptide
SAS

SEQ ID NO: 612 - protein, 9 aa, Artificial Sequence
  Description of Artificial Sequence: Synthetic peptide
QQYNNYPFT

SEQ ID NO: 613 - protein, 122 aa, Artificial Sequence
  Description of Artificial Sequence: Synthetic polypeptide
EVQLVESGGGLVQPGGSLRLSCAASGFTFSSFGMHWVRQAPGKGLEWVAYISSDSSAIYYADTVKGRFTISRDNAKNSLYLQMNSLRDEDTAVYYCGRGRENIYYGSRLDYWGQGTTVTVSS

SEQ ID NO: 614 - protein, 8 aa, Artificial Sequence
  Description of Artificial Sequence: Synthetic peptide
GFTFSSFG

SEQ ID NO: 615 - protein, 8 aa, Artificial Sequence
  Description of Artificial Sequence: Synthetic peptide
ISSDSSAI

SEQ ID NO: 616 - protein, 15 aa, Artificial Sequence
  Description of Artificial Sequence: Synthetic peptide
GRGRENIYYGSRLDY

SEQ ID NO: 617 - protein, 107 aa, Artificial Sequence
  Description of Artificial Sequence: Synthetic polypeptide
DIVMTQSPATLSVTPGDRVSLSCRASQSISDYLHWYQQKSHESPRLLIKYASQSISGIPSRFSGSGSGSDFTLSINSVEPEDVGVYYCQNGHSFPLTFGAGTKLELK

SEQ ID NO: 618 - protein, 6 aa, Artificial Sequence
  Description of Artificial Sequence: Synthetic peptide
QSISDY

SEQ ID NO: 619 - protein, 3 aa, Artificial Sequence
  Description of Artificial Sequence: Synthetic peptide
YAS

SEQ ID NO: 620 - protein, 9 aa, Artificial Sequence
  Description of Artificial Sequence: Synthetic peptide
QNGHSFPLT

SEQ ID NO: 621 - protein, 118 aa, Artificial Sequence
  Description of Artificial Sequence: Synthetic polypeptide
QVQLQQSGAELVKPGASVKLSCKASGYTFTNYDINWVRQRPEQGLEWIGWIFPGDGSTQYNEKFKGKATLTTDTSSSTAYMQLSRLTSEDSAVYFCARQTTATWFAYWGQGTLVTVSA

SEQ ID NO: 622 - protein, 8 aa, Artificial Sequence
  Description of Artificial Sequence: Synthetic peptide
GYTFTNYD

SEQ ID NO: 623 - protein, 8 aa, Artificial Sequence
  Description of Artificial Sequence: Synthetic peptide
IFPGDGST

SEQ ID NO: 624 - protein, 11 aa, Artificial Sequence
  Description of Artificial Sequence: Synthetic peptide
ARQTTATWFAY

SEQ ID NO: 625 - protein, 107 aa, Artificial Sequence [sequence omitted]

SEQ ID NO: 626 - protein, 6 aa, Artificial Sequence
  Description of Artificial Sequence: Synthetic peptide
LSINTF

SEQ ID NO: 627 - protein, 3 aa, Artificial Sequence
  Description of Artificial Sequence: Synthetic peptide
AAS

SEQ ID NO: 628 - protein, 9 aa, Artificial Sequence
  Description of Artificial Sequence: Synthetic peptide
QQSSNTPFT

SEQ ID NO: 629 - protein, 117 aa, Artificial Sequence [sequence omitted]

SEQ ID NO: 630 - protein, 8 aa, Artificial Sequence
  Description of Artificial Sequence: Synthetic peptide
GFTFSNFG

SEQ ID NO: 631 - protein, 8 aa, Artificial Sequence
  Description of Artificial Sequence: Synthetic peptide
ISGGGRDT

SEQ ID NO: 632 - protein, 10 aa, Artificial Sequence
  Description of Artificial Sequence: Synthetic peptide
VKWGNIYFDY

SEQ ID NO: 633 - protein, 107 aa, Artificial Sequence
  Description of Artificial Sequence: Synthetic polypeptide
DIQMTQSPSSLSASVGDRVTITCLASQTIGTWLTWYQQKPGKAPKLLIYTATSLADGVPSRFSGSGSGTDFTLTISSLQPEDFATYYCQQVYSIPWTFGGGTKVEIK

SEQ ID NO: 634 - protein, 6 aa, Artificial Sequence
  Description of Artificial Sequence: Synthetic peptide
QTIGTW

SEQ ID NO: 635 - protein, 3 aa, Artificial Sequence
  Description of Artificial Sequence: Synthetic peptide
TAT

SEQ ID NO: 636 - protein, 9 aa, Artificial Sequence
  Description of Artificial Sequence: Synthetic peptide
QQVYSIPWT

SEQ ID NO: 637 - protein, 116 aa, Artificial Sequence
  Description of Artificial Sequence: Synthetic polypeptide
EVQLVESGGGLVQPGGSLRLSCAASGFTFSSYMMSWVRQAPGKGLEWVATISGGGANTYYPDSVKGRFTISRDNAKNSLYLQMNSLRAEDTAVYYCARQLYYFDYWGQGTTVTVSS

SEQ ID NO: 638 - protein, 8 aa, Artificial Sequence
  Description of Artificial Sequence: Synthetic peptide
GFTFSSYM

SEQ ID NO: 639 - protein, 8 aa, Artificial Sequence
  Description of Artificial Sequence: Synthetic peptide
ISGGGANT

SEQ ID NO: 640 - protein, 9 aa, Artificial Sequence
  Description of Artificial Sequence: Synthetic peptide
ARQLYYFDY

SEQ ID NO: 641 - protein, 107 aa, Artificial Sequence [sequence omitted]

SEQ ID NO: 642 - protein, 6 aa, Artificial Sequence
  Description of Artificial Sequence: Synthetic peptide
QSVSSY

SEQ ID NO: 643 - protein, 3 aa, Artificial Sequence
  Description of Artificial Sequence: Synthetic peptide
DAS

SEQ ID NO: 644 - protein, 9 aa, Artificial Sequence
  Description of Artificial Sequence: Synthetic peptide
QQSSNWPRT

SEQ ID NO: 645 - protein, 113 aa, Artificial Sequence [sequence omitted]

SEQ ID NO: 646 - protein, 8 aa, Artificial Sequence
  Description of Artificial Sequence: Synthetic peptide
GITFSNSG

SEQ ID NO: 647 - protein, 8 aa, Artificial Sequence
  Description of Artificial Sequence: Synthetic peptide
IWYDGSKR

SEQ ID NO: 648 - protein, 6 aa, Artificial Sequence
  Description of Artificial Sequence: Synthetic peptide
ATNDDY

SEQ ID NO: 649 - protein, 107 aa, Artificial Sequence
  Description of Artificial Sequence: Synthetic polypeptide
DIQMTQSPSSVSASVGDRVTITCRASQGISSWLAWYQQKPGKAPKLLISAASSLQSGVPSRFSGSGSGTDFTLTISSLQPEDFATYYCQQANHLPFTFGGGTKVEIK

SEQ ID NO: 650 - protein, 6 aa, Artificial Sequence
  Description of Artificial Sequence: Synthetic peptide
QGISSW

SEQ ID NO: 651 - protein, 3 aa, Artificial Sequence
  Description of Artificial Sequence: Synthetic peptide
AAS

SEQ ID NO: 652 - protein, 9 aa, Artificial Sequence
  Description of Artificial Sequence: Synthetic peptide
QQANHLPFT

SEQ ID NO: 653 - protein, 120 aa, Artificial Sequence
  Description of Artificial Sequence: Synthetic polypeptide
QVQLVQSGAEVKKPGSSVKVSCKASGGTFSSYAISWVRQAPGQGLEWMGLIIPMFDTAGYAQKFQGRVAITVDESTSTAYMELSSLRSEDTAVYYCARAEHSSTGTFDYWGQGTLVTVSS

SEQ ID NO: 654 - protein, 8 aa, Artificial Sequence
  Description of Artificial Sequence: Synthetic peptide
GGTFSSYA

SEQ ID NO: 655 - protein, 8 aa, Artificial Sequence
  Description of Artificial Sequence: Synthetic peptide
IIPMFDTA

SEQ ID NO: 656 - protein, 13 aa, Artificial Sequence
  Description of Artificial Sequence: Synthetic peptide
ARAEHSSTGTFDY

SEQ ID NO: 657 - protein, 106 aa, Artificial Sequence
  Description of Artificial Sequence: Synthetic polypeptide
QPVLTQPLSVSVALGQTARITCGGNNIGSKNVHWYQQKPGQAPVLVIYRDSNRPSGIPERFSGSNSGNTATLTISRAQAGDEADYYCQVWDSSTAVFGTGTKLTVL

SEQ ID NO: 658 - protein, 6 aa, Artificial Sequence
  Description of Artificial Sequence: Synthetic peptide
NIGSKN

SEQ ID NO: 659 - protein, 3 aa, Artificial Sequence
  Description of Artificial Sequence: Synthetic peptide
RDS

SEQ ID NO: 660 - protein, 9 aa, Artificial Sequence
  Description of Artificial Sequence: Synthetic peptide
QVWDSSTAV

SEQ ID NO: 661 - protein, 129 aa, Artificial Sequence
  Description of Artificial Sequence: Synthetic polypeptide
QVQLVQSGGGLVQPGGSLRLSCAASGFTFSSYWMYWVRQVPGKGLEWVSAIDTGGGRTYYADSVKGRFAISRVNAKNTMYLQMNSLRAEDTAVYYCARDEGGGTGWGVLKDWPYGLDAWGQGTLVTVSS

SEQ ID NO: 662 - protein, 8 aa, Artificial Sequence
  Description of Artificial Sequence: Synthetic peptide
GFTFSSYW

SEQ ID NO: 663 - protein, 8 aa, Artificial Sequence
  Description of Artificial Sequence: Synthetic peptide
IDTGGGRT

SEQ ID NO: 664 - protein, 22 aa, Artificial Sequence
  Description of Artificial Sequence: Synthetic peptide
ARDEGGGTGWGVLKDWPYGLDA

SEQ ID NO: 665 - protein, 111 aa, Artificial Sequence [sequence omitted]

SEQ ID NO: 666 - protein, 10 aa, Artificial Sequence
  Description of Artificial Sequence: Synthetic peptide
KGVSTSGYSY

SEQ ID NO: 667 - protein, 3 aa, Artificial Sequence
  Description of Artificial Sequence: Synthetic peptide
LAS

SEQ ID NO: 668 - protein, 9 aa, Artificial Sequence
  Description of Artificial Sequence: Synthetic peptide
QHSRDLPLT

SEQ ID NO: 669 - protein, 120 aa, Artificial Sequence [sequence omitted]

SEQ ID NO: 670 - protein, 8 aa, Artificial Sequence
  Description of Artificial Sequence: Synthetic peptide
GYTFTNYY

SEQ ID NO: 671 - protein, 8 aa, Artificial Sequence
  Description of Artificial Sequence: Synthetic peptide
INPSNGGT

SEQ ID NO: 672 - protein, 14 aa, Artificial Sequence
  Description of Artificial Sequence: Synthetic peptide
ARRDYRFDMGFDYW

SEQ ID NO: 673 - protein, 107 aa, Artificial Sequence
  Description of Artificial Sequence: Synthetic polypeptide
EIVLTQSPATLSLSPGERATLSCRASQSVRSYLAWYQQKPGQAPRLLIYDASNRATGIPARFSGSGSGTDFTLTISSLEPEDFAVYYCQQRNYWPLTFGQGTKVEIK

SEQ ID NO: 674 - protein, 6 aa, Artificial Sequence
  Description of Artificial Sequence: Synthetic peptide
QSVRSY

SEQ ID NO: 675 - protein, 3 aa, Artificial Sequence
  Description of Artificial Sequence: Synthetic peptide
DAS

SEQ ID NO: 676 - protein, 9 aa, Artificial Sequence
  Description of Artificial Sequence: Synthetic peptide
QQRNYWPLT

SEQ ID NO: 677 - protein, 122 aa, Artificial Sequence
  Description of Artificial Sequence: Synthetic polypeptide
VQLVQSGAEVKKPGSSVKVSCKASGGTFSSYAISWVRQAPGQGLEWMGGIIPIFDTANYAQKFQGRVTITADESTSTAYMELSSLRSEDTAVYYCARPGLAAAYDTGSLDYWGQGTLVTVSS

SEQ ID NO: 678 - protein, 8 aa, Artificial Sequence
  Description of Artificial Sequence: Synthetic peptide
GGTFSSYA

SEQ ID NO: 679 - protein, 8 aa, Artificial Sequence
  Description of Artificial Sequence: Synthetic peptide
IIPIFDTA

SEQ ID NO: 680 - protein, 16 aa, Artificial Sequence
  Description of Artificial Sequence: Synthetic peptide
ARPGLAAAYDTGSLDY

SEQ ID NO: 681 - protein, 106 aa, Artificial Sequence
  Description of Artificial Sequence: Synthetic polypeptide
DIQLTQSPAIMSASPGEKVTMTCRASSSVSYMNWYQQKSGTSPKRWIYDTSKVASGVPYRFSGSGSGTSYSLTISSMEAEDAATYYCQQWSSNPLTFGAGTKLELK

SEQ ID NO: 682 - protein, 5 aa, Artificial Sequence
  Description of Artificial Sequence: Synthetic peptide
SSVSY

SEQ ID NO: 683 - protein, 3 aa, Artificial Sequence
  Description of Artificial Sequence: Synthetic peptide
DTS

SEQ ID NO: 684 - protein, 9 aa, Artificial Sequence
  Description of Artificial Sequence: Synthetic peptide
QQWSSNPLT

SEQ ID NO: 685 - protein, 119 aa, Artificial Sequence
  Description of Artificial Sequence: Synthetic polypeptide
DIKLQQSGAELARPGASVKMSCKTSGYTFTRYTMHWVKQRPGQGLEWIGYINPSRGYTNYNQKFKDKATLTTDKSSSTAYMQLSSLTSEDSAVYYCARYYDDHYCLDYWGQGTTLTVSS

SEQ ID NO: 686 - protein, 8 aa, Artificial Sequence
  Description of Artificial Sequence: Synthetic peptide
GYTFTRYT

SEQ ID NO: 687 - protein, 8 aa, Artificial Sequence
  Description of Artificial Sequence: Synthetic peptide
INPSRGYT

SEQ ID NO: 688 - protein, 12 aa, Artificial Sequence
  Description of Artificial Sequence: Synthetic peptide
ARYYDDHYCLDY

SEQ ID NO: 689 - protein, 110 aa, Artificial Sequence [sequence omitted]

SEQ ID NO: 690 - protein, 8 aa, Artificial Sequence
  Description of Artificial Sequence: Synthetic peptide
SGNIENNY

SEQ ID NO: 691 - protein, 3 aa, Artificial Sequence
  Description of Artificial Sequence: Synthetic peptide
DDD

SEQ ID NO: 692 - protein, 9 aa, Artificial Sequence
  Description of Artificial Sequence: Synthetic peptide
HSYVSSFNV

SEQ ID NO: 693 - protein, 119 aa, Artificial Sequence [sequence omitted]

SEQ ID NO: 694 - protein, 8 aa, Artificial Sequence
  Description of Artificial Sequence: Synthetic peptide
GFTFSSFP

SEQ ID NO: 695 - protein, 8 aa, Artificial Sequence
  Description of Artificial Sequence: Synthetic peptide
ISTSGGRT

SEQ ID NO: 696 - protein, 12 aa, Artificial Sequence
  Description of Artificial Sequence: Synthetic peptide
AKFRQYSGGFDY

SEQ ID NO: 697 - protein, 107 aa, Artificial Sequence
  Description of Artificial Sequence: Synthetic polypeptide
DIQMTQTTSSLSASLGDRVTISCRASQDIRNYLNWYQQKPDGTVKLLIYYTSRLHSGVPSKFSGSGSGTDYSLTISNLEQEDIATYFCQQGNTLPWTFAGGTKLEIK

SEQ ID NO: 698 - protein, 6 aa, Artificial Sequence
  Description of Artificial Sequence: Synthetic peptide
QDIRNY

SEQ ID NO: 699 - protein, 3 aa, Artificial Sequence
  Description of Artificial Sequence: Synthetic peptide
YTS

SEQ ID NO: 700 - protein, 13 aa, Artificial Sequence
  Description of Artificial Sequence: Synthetic peptide
QQGNTLPWTFAGG

SEQ ID NO: 701 - protein, 122 aa, Artificial Sequence
  Description of Artificial Sequence: Synthetic polypeptide
EVQLQQSGPELVKPGASMKISCKASGYSFTGYTMNWVKQSHGKNLEWMGLINPYKGVSTYNQKFKDKATLTVDKSSSTAYMELLSLTSEDSAVYYCARSGYYGDSDWYFDVWGQGTTLTVFS

SEQ ID NO: 702 - protein, 8 aa, Artificial Sequence
  Description of Artificial Sequence: Synthetic peptide
GYSFTGYT

SEQ ID NO: 703 - protein, 8 aa, Artificial Sequence
  Description of Artificial Sequence: Synthetic peptide
INPYKGVS

SEQ ID NO: 704 - protein, 15 aa, Artificial Sequence
  Description of Artificial Sequence: Synthetic peptide
ARSGYYGDSDWYFDV

SEQ ID NO: 705 - protein, 109 aa, Artificial Sequence
  Description of Artificial Sequence: Synthetic polypeptide
QTVVTQEPSLTVSPGGTVTLTCGSSTGAVTSGNYPNWVQQKPGQAPRGLIGGTKFLAPGTPARFSGSLLGGKAALTLSGVQPEDEAEYYCVLWYSNRWVFGGGTKLTVL

SEQ ID NO: 706 - protein, 9 aa, Artificial Sequence
  Description of Artificial Sequence: Synthetic peptide
TGAVTSGNY

SEQ ID NO: 707 - protein, 3 aa, Artificial Sequence
  Description of Artificial Sequence: Synthetic peptide
GTK

SEQ ID NO: 708 - protein, 9 aa, Artificial Sequence
  Description of Artificial Sequence: Synthetic peptide
VLWYSNRWV

SEQ ID NO: 709 - protein, 125 aa, Artificial Sequence
  Description of Artificial Sequence: Synthetic polypeptide
EVQLVESGGGLVQPGGSLKLSCAASGFTFNKYAMNWVRQAPGKGLEWVARIRSKYNNYATYYADSVKDRFTISRDDSKNTAYLQMNNLKTEDTAVYYCVRHGNFGNSYISYWAYWGQGTLVTVSS

SEQ ID NO: 710 - protein, 8 aa, Artificial Sequence
  Description of Artificial Sequence: Synthetic peptide
GFTFNKYA

SEQ ID NO: 711 - protein, 10 aa, Artificial Sequence
  Description of Artificial Sequence: Synthetic peptide
IRSKYNNYAT

SEQ ID NO: 712 - protein, 16 aa, Artificial Sequence
  Description of Artificial Sequence: Synthetic peptide
VRHGNFGNSYISYWAY

SEQ ID NO: 713 - protein, 113 aa, Artificial Sequence
  Description of Artificial Sequence: Synthetic polypeptide
DFVMTQSPDSLAVSLGERVTMSCKSSQSLLNSGNQKNYLTWYQQKPGQPPKLLIYWASTRESGVPDRFSGSGSGTDFTLTISSLQAEDVAVYYCQNDYSYPYTFGQGTKLEIK

SEQ ID NO: 714 - protein, 12 aa, Artificial Sequence
  Description of Artificial Sequence: Synthetic peptide
QSLLNSGNQKNY

SEQ ID NO: 715 - protein, 3 aa, Artificial Sequence
  Description of Artificial Sequence: Synthetic peptide
WAS

SEQ ID NO: 716 - protein, 9 aa, Artificial Sequence
  Description of Artificial Sequence: Synthetic peptide
QNDYSYPYT

SEQ ID NO: 717 - protein, 120 aa, Artificial Sequence
  Description of Artificial Sequence: Synthetic polypeptide
EVQLVQSGAELKKPGASVKVSCKASGYTFTDYYMKWVRQAPGQGLEWIGDIIPSNGATFYNQKFKGRVTITVDKSTSTAYMELSSLRSEDTAVYYCARSHLLRASWFAYWGQGTLVTVSS

SEQ ID NO: 718 - protein, 8 aa, Artificial Sequence
  Description of Artificial Sequence: Synthetic peptide
GYTFTDYY

SEQ ID NO: 719 - protein, 8 aa, Artificial Sequence
  Description of Artificial Sequence: Synthetic peptide
IIPSNGAT

SEQ ID NO: 720 - protein, 14 aa, Artificial Sequence
  Description of Artificial Sequence: Synthetic peptide
ARSHLLRASWFAYW

SEQ ID NO: 721 - protein, 106 aa, Artificial Sequence [sequence omitted]

SEQ ID NO: 722 - protein, 5 aa, Artificial Sequence
  Description of Artificial Sequence: Synthetic peptide
SSVSY

SEQ ID NO: 723 - protein, 3 aa, Artificial Sequence
  Description of Artificial Sequence: Synthetic peptide
DTS

SEQ ID NO: 724 - protein, 9 aa, Artificial Sequence
  Description of Artificial Sequence: Synthetic peptide
QQWSSNPFT

SEQ ID NO: 725 - protein, 119 aa, Artificial Sequence [sequence omitted]

SEQ ID NO: 726 - protein, 8 aa, Artificial Sequence
  Description of Artificial Sequence: Synthetic peptide
GYTFTRYT

SEQ ID NO: 727 - protein, 8 aa, Artificial Sequence
  Description of Artificial Sequence: Synthetic peptide
INPSRGYT

SEQ ID NO: 728 - protein, 12 aa, Artificial Sequence
  Description of Artificial Sequence: Synthetic peptide
ARYYDDHYCLDY

SEQ ID NO: 729 - protein, 108 aa, Artificial Sequence [sequence omitted]

SEQ ID NO: 730 - protein, 6 aa, Artificial Sequence
  Description of Artificial Sequence: Synthetic peptide
QSVSSY

SEQ ID NO: 731 - protein, 3 aa, Artificial Sequence
  Description of Artificial Sequence: Synthetic peptide
DAS

SEQ ID NO: 732 - protein, 10 aa, Artificial Sequence
  Description of Artificial Sequence: Synthetic peptide
QQRSNWPPLT

SEQ ID NO: 733 - protein, 118 aa, Artificial Sequence [sequence omitted]

SEQ ID NO: 734 - protein, 8 aa, Artificial Sequence
  Description of Artificial Sequence: Synthetic peptide
GFKFSGYG

SEQ ID NO: 735 - protein, 8 aa, Artificial Sequence
  Description of Artificial Sequence: Synthetic peptide
IWYDGSKK

SEQ ID NO: 736 - protein, 11 aa, Artificial Sequence
  Description of Artificial Sequence: Synthetic peptide
ARQMGYWHFDL

SEQ ID NO: 737 - protein, 107 aa, Artificial Sequence
  Description of Artificial Sequence: Synthetic polypeptide
DIQMTQSPSSLSASVGDRVTITCRASQSISSYLNWYQQKPGKAPKLLIYAASSLQSGVPSRFSGSGSGTDFTLTISSLQPEDFATYYCQQSYSTPPTFGQGTKVEIK

SEQ ID NO: 738 - protein, 6 aa, Artificial Sequence
  Description of Artificial Sequence: Synthetic peptide
QSISSY

SEQ ID NO: 739 - protein, 3 aa, Artificial Sequence
  Description of Artificial Sequence: Synthetic peptide
AAS

SEQ ID NO: 740 - protein, 9 aa, Artificial Sequence
  Description of Artificial Sequence: Synthetic peptide
QQSYSTPPT

SEQ ID NO: 741 - protein, 118 aa, Artificial Sequence
  Description of Artificial Sequence: Synthetic polypeptide
QVQLVQSGAEVKKPGASVKVSCKASGYTFTSYYMHWVRQAPGQGLEWMGIINPSGGSTSYAQKFQGRVTMTRDTSTSTVYMELSSLRSEDTAVYYCAKGTTGDWFDYWGQGTLVTVSS

SEQ ID NO: 742 - protein, 8 aa, Artificial Sequence
  Description of Artificial Sequence: Synthetic peptide
GYTFTSYY

SEQ ID NO: 743 - protein, 8 aa, Artificial Sequence
  Description of Artificial Sequence: Synthetic peptide
INPSGGST

SEQ ID NO: 744 - protein, 11 aa, Artificial Sequence
  Description of Artificial Sequence: Synthetic peptide
AKGTTGDWFDY

SEQ ID NO: 745 - protein, 111 aa, Artificial Sequence
  Description of Artificial Sequence: Synthetic polypeptide
DIVLTQSPASLAVSLGQRATISCKASQSVDFDGDSYMNWYQQKPGQPPKVLIYAASNLESGIPARFSGSGSGTDFTLNIHPVEEEDAATYYCQQSNEDPWTFGGGTKLEIK

SEQ ID NO: 746 - protein, 10 aa, Artificial Sequence
  Description of Artificial Sequence: Synthetic peptide
QSVDFDGDSY

SEQ ID NO: 747 - protein, 3 aa, Artificial Sequence
  Description of Artificial Sequence: Synthetic peptide
AAS

SEQ ID NO: 748 - protein, 9 aa, Artificial Sequence
  Description of Artificial Sequence: Synthetic peptide
QQSNEDPWT

SEQ ID NO: 749 - protein, 117 aa, Artificial Sequence
  Description of Artificial Sequence: Synthetic polypeptide
QIQLQQSGPEVVKPGASVKISCKASGYTFTDYYITWVKQKPGQGLEWIGWIYPGSGNTKYNEKFKGKATLTVDTSSSTAFMQLSSLTSEDTAVYFCANYGNYWFAYWGQGTQVTVSA

SEQ ID NO: 750 - protein, 8 aa, Artificial Sequence
  Description of Artificial Sequence: Synthetic peptide
GYTFTDYY

SEQ ID NO: 751 - protein, 8 aa, Artificial Sequence
  Description of Artificial Sequence: Synthetic peptide
IYPGSGNT

SEQ ID NO: 752 - protein, 10 aa, Artificial Sequence
  Description of Artificial Sequence: Synthetic peptide
ANYGNYWFAY

SEQ ID NO: 753 - protein, 107 aa, Artificial Sequence
  Description of Artificial Sequence: Synthetic polypeptide
DIQMTQSPTSLSASVGDRVTITCRASQGISSWLTWYQQKPEKAPKSLIYAASSLQSGVPSRFSGSGSGTDFTLTISSLQPEDFATYYCQQYDSYPITFGQGTRLEIK

SEQ ID NO: 754 - protein, 6 aa, Artificial Sequence
  Description of Artificial Sequence: Synthetic peptide
QGISSW

SEQ ID NO: 755 - protein, 3 aa, Artificial Sequence
  Description of Artificial Sequence: Synthetic peptide
AAS

SEQ ID NO: 756 - protein, 9 aa, Artificial Sequence
  Description of Artificial Sequence: Synthetic peptide
QQYDSYPIT

SEQ ID NO: 757 - protein, 112 aa, Artificial Sequence
  Description of Artificial Sequence: Synthetic polypeptide
QVQLQQWGAGLLKPSETLSLTCAVYGGSFSAYYWSWIRQPPGKGLEWIGDINHGGGTNYNPSLKSRVTISVDTSKNQFSLKLNSVTAADTAVYYCASLTAYWGQGSLVTVSS

SEQ ID NO: 758 - protein, 8 aa, Artificial Sequence
  Description of Artificial Sequence: Synthetic peptide
GGSFSAYY

SEQ ID NO: 759 - protein, 7 aa, Artificial Sequence
  Description of Artificial Sequence: Synthetic peptide
INHGGGT

SEQ ID NO: 760 - protein, 6 aa, Artificial Sequence
  Description of Artificial Sequence: Synthetic peptide
ASLTAY

SEQ ID NO: 761 - protein, 107 aa, Artificial Sequence
  Description of Artificial Sequence: Synthetic polypeptide
DIQMTQSPSSLSASVGDRVTITCKASQDVGIAVAWYQQKPGKVPKLLIYWASTRHTGVPDRFSGSGSGTDFTLTISSLQPEDVATYYCQQYSSYPYTFGQGTKVEIK

SEQ ID NO: 762 - protein, 6 aa, Artificial Sequence
  Description of Artificial Sequence: Synthetic peptide
QDVGIA

SEQ ID NO: 763 - protein, 3 aa, Artificial Sequence
  Description of Artificial Sequence: Synthetic peptide
WAS

SEQ ID NO: 764 - protein, 9 aa, Artificial Sequence
  Description of Artificial Sequence: Synthetic peptide
QQYSSYPYT

SEQ ID NO: 765 - protein, 119 aa, Artificial Sequence
  Description of Artificial Sequence: Synthetic polypeptide
EVQLVESGGGLVQPGGSLRLSCAASGFDFSRYWMSWVRQAPGKGLEWIGEINPDSSTINYAPSLKDKFIISRDNAKNSLYLQMNSLRAEDTAVYYCARPDGNYWYFDVWGQGTLVTVSS

SEQ ID NO: 766 - protein, 8 aa, Artificial Sequence
  Description of Artificial Sequence: Synthetic peptide
GFDFSRYW

SEQ ID NO: 767 - protein, 8 aa, Artificial Sequence
  Description of Artificial Sequence: Synthetic peptide
INPDSSTI

SEQ ID NO: 768 - protein, 12 aa, Artificial Sequence
  Description of Artificial Sequence: Synthetic peptide
ARPDGNYWYFDV

SEQ ID NO: 769 - protein, 106 aa, Artificial Sequence
  Description of Artificial Sequence: Synthetic polypeptide
DIVLTQSPTIMSASPGERVTMTCTASSSVNYIHWYQQKSGDSPLRWIFDTSKVASGVPARFSGSGSGTSYSLTISTMEAEDAATYYCQQWRSYPLTFGDGTRLELK

SEQ ID NO: 770 - protein, 5 aa, Artificial Sequence
  Description of Artificial Sequence: Synthetic peptide
SSVNY

SEQ ID NO: 771 - protein, 3 aa, Artificial Sequence
  Description of Artificial Sequence: Synthetic peptide
DTS

SEQ ID NO: 772 - protein, 9 aa, Artificial Sequence
  Description of Artificial Sequence: Synthetic peptide
QQWRSYPLT

SEQ ID NO: 773 - protein, 120 aa, Artificial Sequence
  Description of Artificial Sequence: Synthetic polypeptide
EVKLQESGPELVKPGASVKMSCKASGYKFTDYVVHWLKQKPGQGLEWIGYINPYNDGTKYNEKFKGKATLTSDKSSSTAYMEVSSLTSEDSAVYYCARDYRYEVYGMDYWGQGTSVTVSS

SEQ ID NO: 774 - protein, 8 aa, Artificial Sequence
  Description of Artificial Sequence: Synthetic peptide
GYKFTDYV

SEQ ID NO: 775 - protein, 8 aa, Artificial Sequence
  Description of Artificial Sequence: Synthetic peptide
INPYNDGT

SEQ ID NO: 776 - protein, 13 aa, Artificial Sequence
  Description of Artificial Sequence: Synthetic peptide
ARDYRYEVYGMDY

SEQ ID NO: 777 - protein, 106 aa, Artificial Sequence
  Description of Artificial Sequence: Synthetic polypeptide
DIVMTQSPSSLSASLGGKVTITCKASQDINKYIAWYQHKPGKGPRLLIHYTSTLQPGIPSRFSGSGSGRDYSFSISNLEPEDIATYYCLQYDNLLTFGAGTKLELK

SEQ ID NO: 778 - protein, 6 aa, Artificial Sequence
  Description of Artificial Sequence: Synthetic peptide
QDINKY

SEQ ID NO: 779 - protein, 3 aa, Artificial Sequence
  Description of Artificial Sequence: Synthetic peptide
YTS

SEQ ID NO: 780 - protein, 8 aa, Artificial Sequence
  Description of Artificial Sequence: Synthetic peptide
LQYDNLLT

SEQ ID NO: 781 - protein, 119 aa, Artificial Sequence
  Description of Artificial Sequence: Synthetic polypeptide
EVKLQQSGPELVKPGTSVKVSCKASGYSFTDYNMYWVKQSHGKSLEWIGYIDPYKGGTIYNQKFKGKATLTVDKSSSTAFMHLNSLTSEDSAVYYCAREMITAYYFDYWGQGSSVTVSS

SEQ ID NO: 782 - protein, 8 aa, Artificial Sequence
  Description of Artificial Sequence: Synthetic peptide
GYSFTDYN

SEQ ID NO: 783 - protein, 8 aa, Artificial Sequence
  Description of Artificial Sequence: Synthetic peptide
IDPYKGGT

SEQ ID NO: 784 - protein, 12 aa, Artificial Sequence
  Description of Artificial Sequence: Synthetic peptide
AREMITAYYFDY

SEQ ID NO: 785 - protein, 111 aa, Artificial Sequence
  Description of Artificial Sequence: Synthetic polypeptide
DIVLTQSPASLAVSLGQRATISCRASESVDNYGISFMNWFQQKPGQPPKLLIYAASNQGSGVPARFSGSGSGTDFSLNIHPMEEDDTAMYFCQQSKEVPWTFGGGTKLEIK

SEQ ID NO: 786 - protein, 10 aa, Artificial Sequence
  Description of Artificial Sequence: Synthetic peptide
ESVDNYGISF

SEQ ID NO: 787 - protein, 3 aa, Artificial Sequence
  Description of Artificial Sequence: Synthetic peptide
AAS

SEQ ID NO: 788 - protein, 9 aa, Artificial Sequence
  Description of Artificial Sequence: Synthetic peptide
QQSKEVPWT

SEQ ID NO: 789 - protein, 116 aa, Artificial Sequence
  Description of Artificial Sequence: Synthetic polypeptide
EVQLQQSGPELVKPGASVKISCKASGYTFTDYNMHWVKQSHGKSLEWIGYIYPYNGGTGYNQKFKSKATLTVDNSSSTAYMDVRSLTSEDSAVYYCARGRPAMDYWGQGTSVTVSS

SEQ ID NO: 790 - protein, 8 aa, Artificial Sequence
  Description of Artificial Sequence: Synthetic peptide
GYTFTDYN

SEQ ID NO: 791 - protein, 8 aa, Artificial Sequence
  Description of Artificial Sequence: Synthetic peptide
IYPYNGGT

SEQ ID NO: 792 - protein, 9 aa, Artificial Sequence
  Description of Artificial Sequence: Synthetic peptide
ARGRPAMDY

SEQ ID NO: 793 - protein, 111 aa, Artificial Sequence [sequence omitted]

SEQ ID NO: 794 - protein, 10 aa, Artificial Sequence
  Description of Artificial Sequence: Synthetic peptide
ESLDNYGIRF

SEQ ID NO: 795 - protein, 3 aa, Artificial Sequence
  Description of Artificial Sequence: Synthetic peptide
AAS

SEQ ID NO: 796 - protein, 9 aa, Artificial Sequence
  Description of Artificial Sequence: Synthetic peptide
QQTKEVPWS

SEQ ID NO: 797 - protein, 116 aa, Artificial Sequence [sequence omitted]

SEQ ID NO: 798 - protein, 8 aa, Artificial Sequence
  Description of Artificial Sequence: Synthetic peptide
GYTITDSN

SEQ ID NO: 799 - protein, 8 aa, Artificial Sequence
  Description of Artificial Sequence: Synthetic peptide
IYPYNGGT

SEQ ID NO: 800 - protein, 9 aa, Artificial Sequence
  Description of Artificial Sequence: Synthetic peptide
VNGNPWLAY

SEQ ID NO: 801 - protein, 112 aa, Artificial Sequence
  Description of Artificial Sequence: Synthetic polypeptide
NIMLTQSPSSLAVSAGEKVTMSCKSSQSVFFSSSQKNYLAWYQQIPGQSPKLLIYWASTRESGVPDRFTGSGSGTDFTLTISSVQSEDLAIYYCHQYLSSRTFGGGTKLEIK

SEQ ID NO: 802 - protein, 12 aa, Artificial Sequence
  Description of Artificial Sequence: Synthetic peptide
QSVFFSSSQKNY

SEQ ID NO: 803 - protein, 3 aa, Artificial Sequence
  Description of Artificial Sequence: Synthetic peptide
WAS

SEQ ID NO: 804 - protein, 8 aa, Artificial Sequence
  Description of Artificial Sequence: Synthetic peptide
HQYLSSRT

SEQ ID NO: 805 - protein, 118 aa, Artificial Sequence
  Description of Artificial Sequence: Synthetic polypeptide
QVQLQQPGAEVVKPGASVKMSCKASGYTFTSYYIHWIKQTPGQGLEWVGVIYPGNDDISYNQKFKGKATLTADKSSTTAYMQLSSLTSEDSAVYYCAREVRLRYFDVWGAGTTVTVSS

SEQ ID NO: 806 - protein, 8 aa, Artificial Sequence
  Description of Artificial Sequence: Synthetic peptide
GYTFTSYY

SEQ ID NO: 807 - protein, 8 aa, Artificial Sequence
  Description of Artificial Sequence: Synthetic peptide
IYPGNDDI

SEQ ID NO: 808 - protein, 11 aa, Artificial Sequence
  Description of Artificial Sequence: Synthetic peptide
AREVRLRYFDV

SEQ ID NO: 809 - protein, 107 aa, Artificial Sequence
  Description of Artificial Sequence: Synthetic polypeptide
DIKMTQSPSSMYASLGERVIINCKASQDINSYLSWFQQKPGKSPKTLIYRANRLVDGVPSRFSGSGSGQDYSLTISSLEYEDMGIYYCLQYDEFPLTFGAGTKLELK

SEQ ID NO: 810 - protein, 6 aa, Artificial Sequence
  Description of Artificial Sequence: Synthetic peptide
QDINSY

SEQ ID NO: 811 - protein, 3 aa, Artificial Sequence
  Description of Artificial Sequence: Synthetic peptide
RAN

SEQ ID NO: 812 - protein, 9 aa, Artificial Sequence
  Description of Artificial Sequence: Synthetic peptide
LQYDEFPLT

SEQ ID NO: 813 - protein, 117 aa, Artificial Sequence
  Description of Artificial Sequence: Synthetic polypeptide
QVQLQQSGPELVRPGTFVKISCKASGYTFTNYDINWVNQRPGQGLEWIGWIYPGDGSTKYNEKFKAKATLTADKSSSTAYLQLNNLTSENSAVYFCASGYEDAMDYWGQGTSVTVSS

SEQ ID NO: 814 - protein, 8 aa, Artificial Sequence
  Description of Artificial Sequence: Synthetic peptide
GYTFTNYD

SEQ ID NO: 815 - protein, 8 aa, Artificial Sequence
  Description of Artificial Sequence: Synthetic peptide
IYPGDGST

SEQ ID NO: 816 - protein, 10 aa, Artificial Sequence
  Description of Artificial Sequence: Synthetic peptide
ASGYEDAMDY

SEQ ID NO: 817 - protein, 111 aa, Artificial Sequence
  Description of Artificial Sequence: Synthetic polypeptide
DIQMTQSPSSLSASVGDRVTITCRASESVDNYGISFMNWFQQKPGKAPKLLLYAASNQGSGVPSRFSGSGSGTDFTLTISSLQPDDFATYYCQQSKEVPWTFGQGTKVELK

SEQ ID NO: 818 - protein, 10 aa, Artificial Sequence
  Description of Artificial Sequence: Synthetic peptide
ESVDNYGISF

SEQ ID NO: 819 - protein, 3 aa, Artificial Sequence
  Description of Artificial Sequence: Synthetic peptide
AAS

SEQ ID NO: 820 - protein, 9 aa, Artificial Sequence
  Description of Artificial Sequence: Synthetic peptide
QQSKEVPWT

SEQ ID NO: 821 - protein, 116 aa, Artificial Sequence
  Description of Artificial Sequence: Synthetic polypeptide
QVQLVQSGAEVKKPGSSVKVSCKASGYTFTDYNMHWVRQAPGQGLEWLGYIYPYNGGTGYNQKFKSKATITADESTNTAYMELSSLRSEDTAVYYCARGRPAMDYWGQGTLVTVSS

SEQ ID NO: 822 - protein, 8 aa, Artificial Sequence
  Description of Artificial Sequence: Synthetic peptide
GYTFTDYN

SEQ ID NO: 823 - protein, 8 aa, Artificial Sequence
  Description of Artificial Sequence: Synthetic peptide
IYPYNGGT

SEQ ID NO: 824 - protein, 10 aa, Artificial Sequence
  Description of Artificial Sequence: Synthetic peptide
ARGRPAMDYW

SEQ ID NO: 825 - protein, 110 aa, Artificial Sequence
  Description of Artificial Sequence: Synthetic polypeptide
QSVLTQPPSASGTPGQRVTISCSGSSSNIGNNYVSWYQQLPGTAPKLLIYENYNRPAGVPDRFSGSKSGTSASLAISGLRSEDEADYYCSSWDDSLNYWVFGGGTKLTVL

SEQ ID NO: 826 - protein, 8 aa, Artificial Sequence
  Description of Artificial Sequence: Synthetic peptide
SSNIGNNY

SEQ ID NO: 827 - protein, 4 aa, Artificial Sequence
  Description of Artificial Sequence: Synthetic peptide
ENYN

SEQ ID NO: 828 - protein, 11 aa, Artificial Sequence
  Description of Artificial Sequence: Synthetic peptide
SSWDDSLNYWV

SEQ ID NO: 829 - protein, 122 aa, Artificial Sequence
  Description of Artificial Sequence: Synthetic polypeptide
EVQLLESGGGLVQPGGSLRLSCAASGFTFSSYAMSWVRQAPGKGLEWVSAISGSGTSTYYADSVKGRFTISRDNSKNTLYLQMNSLRAEDTAVYYCARVRYNWNHGDWFDPWGQGTLVTVSS

SEQ ID NO: 830 - protein, 8 aa, Artificial Sequence
  Description of Artificial Sequence: Synthetic peptide
GFTFSSYA

SEQ ID NO: 831 - protein, 8 aa, Artificial Sequence
  Description of Artificial Sequence: Synthetic peptide
ISGSGTST

SEQ ID NO: 832 - protein, 15 aa, Artificial Sequence
  Description of Artificial Sequence: Synthetic peptide
ARVRYNWNHGDWFDP

SEQ ID NO: 833 - protein, 107 aa, Artificial Sequence
  Description of Artificial Sequence: Synthetic polypeptide
DIQMTQSPASLSVSVGETVTITCRASENIYSNLAWYQQKQGKSPQLLVYVATNLADGVPSRFSGSGSGTQYSLKINSLQSEDFGSYYCQHFWGTPYTFGGGTKLEIK

SEQ ID NO: 834 - protein, 6 aa, Artificial Sequence
  Description of Artificial Sequence: Synthetic peptide
ENIYSN

SEQ ID NO: 835 - protein, 3 aa, Artificial Sequence
  Description of Artificial Sequence: Synthetic peptide
VAT

SEQ ID NO: 836 - protein, 9 aa, Artificial Sequence
  Description of Artificial Sequence: Synthetic peptide
QHFWGTPYT

SEQ ID NO: 837 - protein, 118 aa, Artificial Sequence
  Description of Artificial Sequence: Synthetic polypeptide
EVQLQQSGAELVKPGASVKLSCTASGFNINDTYMHWVKQRPEQGLEWIGRIDPANGNTKYDPKFQGKATITADTSSNTAYLQLSSLTSEDTAVYYCARGARGSRFAYWGQGTLVTVSA

SEQ ID NO: 838 - protein, 8 aa, Artificial Sequence
  Description of Artificial Sequence: Synthetic peptide
GFNINDTY

SEQ ID NO: 839 - protein, 8 aa, Artificial Sequence
  Description of Artificial Sequence: Synthetic peptide
IDPANGNT

SEQ ID NO: 840 - protein, 11 aa, Artificial Sequence
  Description of Artificial Sequence: Synthetic peptide
ARGARGSRFAY

SEQ ID NO: 841 - protein, 107 aa, Artificial Sequence
  Description of Artificial Sequence: Synthetic polypeptide
DIQMTQSPSSLSVSVGERVTITCRASENIRSNLAWYQQKPGKSPKLLVNVATNLADGVPSRFSGSGSGTDYSLKINSLQPEDFGTYYCQHYWGTTWTFGQGTKLEIK

SEQ ID NO: 842 - protein, 6 aa, Artificial Sequence
  Description of Artificial Sequence: Synthetic peptide
ENIRSN

SEQ ID NO: 843 - protein, 3 aa, Artificial Sequence
  Description of Artificial Sequence: Synthetic peptide
VAT

SEQ ID NO: 844 - protein, 9 aa, Artificial Sequence
  Description of Artificial Sequence: Synthetic peptide
QHYWGTTWT

SEQ ID NO: 845 - protein, 115 aa, Artificial Sequence
  Description of Artificial Sequence: Synthetic polypeptide
QVQVQESGPGLVAPSQTLSITCTVSGFSLTTSGVSWVRQPPGKGLEWLGVIWGDGSTNYHPSLKSRLSIKKDHSKSQVFLKLNSLTAADTATYYCAKGGYSLAHWGQGTLVTVSS

SEQ ID NO: 846 - protein, 8 aa, Artificial Sequence
  Description of Artificial Sequence: Synthetic peptide
GFSLTTSG

SEQ ID NO: 847 - protein, 7 aa, Artificial Sequence
  Description of Artificial Sequence: Synthetic peptide
IWGDGST

SEQ ID NO: 848 - protein, 9 aa, Artificial Sequence
  Description of Artificial Sequence: Synthetic peptide
AKGGYSLAH

SEQ ID NO: 849 - protein, 107 aa, Artificial Sequence; identical to SEQ ID NO: 737
  Description of Artificial Sequence: Synthetic polypeptide

SEQ ID NO: 850 - protein, 6 aa, Artificial Sequence
  Description of Artificial Sequence: Synthetic peptide
QSISSY

SEQ ID NO: 851 - protein, 3 aa, Artificial Sequence
  Description of Artificial Sequence: Synthetic peptide
AAS

SEQ ID NO: 852 - protein, 9 aa, Artificial Sequence
  Description of Artificial Sequence: Synthetic peptide
QQSYSTPPT

SEQ ID NO: 853 - protein, 118 aa, Artificial Sequence
  Description of Artificial Sequence: Synthetic polypeptide
QVQLVQSGGGVVQPGRSLRLSCVASGFTFSSYGMHWVRQAPGKGLEWVAAIWYNARKQDYADSVKGRFTISRDNSKNTLYLQMNSLRAEDTAVYYCTRGTGYNWFDPWGQGTLVTVSS

SEQ ID NO: 854 - protein, 8 aa, Artificial Sequence
  Description of Artificial Sequence: Synthetic peptide
GFTFSSYG

SEQ ID NO: 855 - protein, 8 aa, Artificial Sequence
  Description of Artificial Sequence: Synthetic peptide
IWYNARKQ

SEQ ID NO: 856 - protein, 11 aa, Artificial Sequence
  Description of Artificial Sequence: Synthetic peptide
TRGTGYNWFDP

SEQ ID NO: 857 - protein, 106 aa, Artificial Sequence
  Description of Artificial Sequence: Synthetic polypeptide
DIVMAQSHKFMSTSVGDRVSITCKASQDVSTVVAWYQQKPGQSPKRLITSASYRYIGVPDRFTGSGSGTDFTFTISSVQAEDLAVTTCQQHYSPYTFGGGTKLEIK

SEQ ID NO: 858 - protein, 6 aa, Artificial Sequence
  Description of Artificial Sequence: Synthetic peptide
ASQDVS

SEQ ID NO: 859 - protein, 4 aa, Artificial Sequence
  Description of Artificial Sequence: Synthetic peptide
ITSA

SEQ ID NO: 860 - protein, 10 aa, Artificial Sequence
  Description of Artificial Sequence: Synthetic peptide
TCQQHYSPYT

SEQ ID NO: 861 - protein, 117 aa, Artificial Sequence
  Description of Artificial Sequence: Synthetic polypeptide
QVKLVESGGGLVKPGGSLKLSCEASGFTFSSYTLSWVRQTPETRLEWVATISIGGRYTTTPDSVEGRFTISRDNAKNTLYLQMNSLKSEDTAMYYCTRDFNGTSDFWGQGTTLTVSS

SEQ ID NO: 862 - protein, 8 aa, Artificial Sequence
  Description of Artificial Sequence: Synthetic peptide
GFTFSSYT

SEQ ID NO: 863 - protein, 8 aa, Artificial Sequence
  Description of Artificial Sequence: Synthetic peptide
ISIGGRYT

SEQ ID NO: 864 - protein, 10 aa, Artificial Sequence
  Description of Artificial Sequence: Synthetic peptide
TRDFNGTSDF

SEQ ID NO: 865 - protein, 107 aa, Artificial Sequence [sequence omitted]

SEQ ID NO: 866 - protein, 6 aa, Artificial Sequence
  Description of Artificial Sequence: Synthetic peptide
QSVSSY

SEQ ID NO: 867 - protein, 3 aa, Artificial Sequence
  Description of Artificial Sequence: Synthetic peptide
DAS

SEQ ID NO: 868 - protein, 9 aa, Artificial Sequence
  Description of Artificial Sequence: Synthetic peptide
QQRSNWPPT

SEQ ID NO: 869 - protein, 122 aa, Artificial Sequence [sequence omitted]

SEQ ID NO: 870 - protein, 8 aa, Artificial Sequence
  Description of Artificial Sequence: Synthetic peptide
GFTFNSFA

SEQ ID NO: 871 - protein, 8 aa, Artificial Sequence
  Description of Artificial Sequence: Synthetic peptide
ISGSGGGT

SEQ ID NO: 872 - protein, 15 aa, Artificial Sequence
  Description of Artificial Sequence: Synthetic peptide
AKDKILWFGEPVFDY

SEQ ID NO: 873 - protein, 107 aa, Artificial Sequence [sequence omitted]

SEQ ID NO: 874 - protein, 6 aa, Artificial Sequence
  Description of Artificial Sequence: Synthetic peptide
QDVSTV

SEQ ID NO: 875 - protein, 3 aa, Artificial Sequence
  Description of Artificial Sequence: Synthetic peptide
SAS

SEQ ID NO: 876 - protein, 9 aa, Artificial Sequence
  Description of Artificial Sequence: Synthetic peptide
QQHYSPPYT

SEQ ID NO: 877 - protein, 120 aa, Artificial Sequence [sequence omitted]

SEQ ID NO: 878 - protein, 8 aa, Artificial Sequence
  Description of Artificial Sequence: Synthetic peptide
GYTFTDYW

SEQ ID NO: 879 - protein, 8 aa, Artificial Sequence
  Description of Artificial Sequence: Synthetic peptide
IYPGDGDT

SEQ ID NO: 880 - protein, 13 aa, Artificial Sequence
  Description of Artificial Sequence: Synthetic peptide
ARGDYYGSNSLDY

SEQ ID NO: 881 - protein, 111 aa, Artificial Sequence
  Description of Artificial Sequence: Synthetic polypeptide
DIVMTQSPDSLAVSLGERATINCRASKSVSTSGYSYIYWYQQKPGQPPKLLIYLASILESGVPDRFSGSGSGTDFTLTISSLQAEDVAVYYCQHSRELPWTFGQGTKVEIK

SEQ ID NO: 882 - protein, 10 aa, Artificial Sequence
  Description of Artificial Sequence: Synthetic peptide
KSVSTSGYSY

SEQ ID NO: 883 - protein, 3 aa, Artificial Sequence
  Description of Artificial Sequence: Synthetic peptide
LAS

SEQ ID NO: 884 - protein, 9 aa, Artificial Sequence
  Description of Artificial Sequence: Synthetic peptide
QHSRELPWT

SEQ ID NO: 885 - protein, 124 aa, Artificial Sequence
  Description of Artificial Sequence: Synthetic polypeptide
EEQLVESGGGLVKPGGSLRLSCAASGFSFSDCRMYWLRQAPGKGLEWIGVISVKSENYGANYAESVRGRFTISRDDSKNTVYLQMNSLKTEDTAVYYCSASYYRYDVGAWFAYWGQGTLVTVSS

SEQ ID NO: 886 - protein, 8 aa, Artificial Sequence
  Description of Artificial Sequence: Synthetic peptide
GFSFSDCR

SEQ ID NO: 887 - protein, 10 aa, Artificial Sequence
  Description of Artificial Sequence: Synthetic peptide
ISVKSENYGA

SEQ ID NO: 888 - protein, 16 aa, Artificial Sequence
  Description of Artificial Sequence: Synthetic peptide
SASYYRYDVGAWFAYW

SEQ ID NO: 889 - protein, 112 aa, Artificial Sequence
  Description of Artificial Sequence: Synthetic polypeptide
DIVMTQSPDSLAVSLGERVTMNCKSSQSLLYSTNQKNYLAWYQQKPGQSPKLLIYWASTRESGVPDRFSGSGSGTDFTLTISSVQAEDVAVYYCQQYYSYRTFGGGTKLEIK

SEQ ID NO: 890 - protein, 12 aa, Artificial Sequence
  Description of Artificial Sequence: Synthetic peptide
QSLLYSTNQKNY

SEQ ID NO: 891 - protein, 3 aa, Artificial Sequence
  Description of Artificial Sequence: Synthetic peptide
WAS

SEQ ID NO: 892 - protein, 8 aa, Artificial Sequence
  Description of Artificial Sequence: Synthetic peptide
QQYYSYRT

SEQ ID NO: 893 - protein, 122 aa, Artificial Sequence
  Description of Artificial Sequence: Synthetic polypeptide
QVQLQQSGPEVVKPGASVKMSCKASGYTFTSYVIHWVRQKPGQGLDWIGYINPYNDGTDYDEKFKGKATLTSDTSTSTAYMELSSLRSEDTAVYYCAREKDNYATGAWFAYWGQGTLVTVSS

SEQ ID NO: 894 - protein, 8 aa, Artificial Sequence
  Description of Artificial Sequence: Synthetic peptide
GYTFTSYV

SEQ ID NO: 895 - protein, 8 aa, Artificial Sequence
  Description of Artificial Sequence: Synthetic peptide
INPYNDGT

SEQ ID NO: 896 - protein, 15 aa, Artificial Sequence
  Description of Artificial Sequence: Synthetic peptide
AREKDNYATGAWFAY

SEQ ID NO: 897 - protein, 112 aa, Artificial Sequence [sequence omitted]

SEQ ID NO: 898 - protein, 11 aa, Artificial Sequence
  Description of Artificial Sequence: Synthetic peptide
QSLVHSNGNTF

SEQ ID NO: 899 - protein, 3 aa, Artificial Sequence
  Description of Artificial Sequence: Synthetic peptide
TVS

SEQ ID NO: 900 - protein, 9 aa, Artificial Sequence
  Description of Artificial Sequence: Synthetic peptide
SQTTHVPWT

SEQ ID NO: 901 - protein, 114 aa, Artificial Sequence [sequence omitted]

SEQ ID NO: 902 - protein, 8 aa, Artificial Sequence
  Description of Artificial Sequence: Synthetic peptide
GYSFTGYY

SEQ ID NO: 903 - protein, 8 aa, Artificial Sequence
  Description of Artificial Sequence: Synthetic peptide
VIPNAGGT

SEQ ID NO: 904 - protein, 7 aa, Artificial Sequence
  Description of Artificial Sequence: Synthetic peptide
AREGIYW

SEQ ID NO: 905 - protein, 106 aa, Artificial Sequence
  Description of Artificial Sequence: Synthetic polypeptide
AIQLTQSPSSLSASVGDRVTITCRASQGISSALAWYQQKPGKAPKLLIYDASNLESGVPSRFSGSGSGTDFTLTISSLQPEDFATYYCQQFNSYPTFGQGTKVEIK

SEQ ID NO: 906 - protein, 6 aa, Artificial Sequence
  Description of Artificial Sequence: Synthetic peptide
QGISSA

SEQ ID NO: 907 - protein, 3 aa, Artificial Sequence
  Description of Artificial Sequence: Synthetic peptide
DAS

SEQ ID NO: 908 - protein, 8 aa, Artificial Sequence
  Description of Artificial Sequence: Synthetic peptide
QQFNSYPT

SEQ ID NO: 909 - protein, 121 aa, Artificial Sequence
  Description of Artificial Sequence: Synthetic polypeptide
QLQLQESGPGLLKPSETLSLTCTVSGGSISSPGYYGGWIRQPPGKGLEWIGSIYKSGSTYHNPSLKSRVTISVDTSKNQFSLKLSSVTAADTAVYYCTRPVVRYFGWFDPWGQGTLVTVSS

SEQ ID NO: 910 - protein, 10 aa, Artificial Sequence
  Description of Artificial Sequence: Synthetic peptide
GGSISSPGYY

SEQ ID NO: 911 - protein, 7 aa, Artificial Sequence
  Description of Artificial Sequence: Synthetic peptide
IYKSGST

SEQ ID NO: 912 - protein, 13 aa, Artificial Sequence
  Description of Artificial Sequence: Synthetic peptide
TRPVVRYFGWFDP

SEQ ID NO: 913 - protein, 112 aa, Artificial Sequence
  Description of Artificial Sequence: Synthetic polypeptide
DIVMTQSPLSLTVTPGEPASISCRSSQSLLYSNGYNYLDWYLQKPGQSPQVLISLGSNRASGVPDRFSGSGSGTDFTLKISRVEAEDVGVYYCMQARQTPFTFGPGTKVDIR

SEQ ID NO: 914 - protein, 11 aa, Artificial Sequence
  Description of Artificial Sequence: Synthetic peptide
QSLLYSNGYNY

SEQ ID NO: 915 - protein, 3 aa, Artificial Sequence
  Description of Artificial Sequence: Synthetic peptide
LGS

SEQ ID NO: 916 - protein, 9 aa, Artificial Sequence
  Description of Artificial Sequence: Synthetic peptide
MQARQTPFT

SEQ ID NO: 917 - protein, 120 aa, Artificial Sequence
  Description of Artificial Sequence: Synthetic polypeptide
QVQLVESGGGVVQPGRSLRLSCAASGFTFSSYGMHWVRQAPGKGLEWVAVISYEESNRYHADSVKGRFTISRDNSKITLYLQMNSLRTEDTAVYYCARDGGIAAPGPDYWGQGTLVTVSS

SEQ ID NO: 918 - protein, 8 aa, Artificial Sequence
  Description of Artificial Sequence: Synthetic peptide
GFTFSSYG

SEQ ID NO: 919 - protein, 8 aa, Artificial Sequence
  Description of Artificial Sequence: Synthetic peptide
ISYEESNR

SEQ ID NO: 920 - protein, 13 aa, Artificial Sequence
  Description of Artificial Sequence: Synthetic peptide
ARDGGIAAPGPDY

SEQ ID NO: 921 - protein, 107 aa, Artificial Sequence
  Description of Artificial Sequence: Synthetic polypeptide
DIQMTQSPSSVSASVGDRVTITCRASQGIYSWLAWYQQKPGKAPNLLIYTASTLQSGVPSRFSGSGSGTDFTLTISSLQPEDFATYYCQQANIFPLTFGGGTKVEIK

SEQ ID NO: 922 - protein, 6 aa, Artificial Sequence
  Description of Artificial Sequence: Synthetic peptide
QGIYSW

SEQ ID NO: 923 - protein, 3 aa, Artificial Sequence
  Description of Artificial Sequence: Synthetic peptide
TAS

SEQ ID NO: 924 - protein, 9 aa, Artificial Sequence
  Description of Artificial Sequence: Synthetic peptide
QQANIFPLT

SEQ ID NO: 925 - protein, 126 aa, Artificial Sequence
  Description of Artificial Sequence: Synthetic polypeptide
QVQLVQSGAEVKKPGASVKVSCKASGYTFTGYYMHWVRQAPGQGLEWMGWINPDSGGTNYAQKFQGRVTMTRDTSISTAYMELNRLRSDDTAVYYCARDQPLGYCTNGVCSYFDYWGQGTLVTVSS

SEQ ID NO: 926 - protein, 8 aa, Artificial Sequence
  Description of Artificial Sequence: Synthetic peptide
GYTFTGYY

SEQ ID NO: 927 - protein, 8 aa, Artificial Sequence
  Description of Artificial Sequence: Synthetic peptide
INPDSGGT

SEQ ID NO: 928 - protein, 19 aa, Artificial Sequence
  Description of Artificial Sequence: Synthetic peptide
ARDQPLGYCTNGVCSYFDY

SEQ ID NO: 929 - protein, 107 aa, Artificial Sequence
  Description of Artificial Sequence: Synthetic polypeptide
DIQMTQSPSSLSASVGDRVTITCRASEDLYYNLAWYQRKPGKAPKLLIYDTYRLADGVPSRFSGSGSGTDYTLTISSLQPEDFASYYCQQYYKFPFTFGQGTKVEIK

SEQ ID NO: 930 - protein, 6 aa, Artificial Sequence
  Description of Artificial Sequence: Synthetic peptide
EDLYYN

SEQ ID NO: 931 - protein, 3 aa, Artificial Sequence
  Description of Artificial Sequence: Synthetic peptide
DTY

SEQ ID NO: 932 - protein, 9 aa, Artificial Sequence
  Description of Artificial Sequence: Synthetic peptide
QQYYKFPFT

SEQ ID NO: 933 - protein, 118 aa, Artificial Sequence
  Description of Artificial Sequence: Synthetic polypeptide
EVQLVESGGGLVQPGGSLRLSCAVSGFSSTNYHVHWVRQAPGKGLEWMGVIWGDGDTSYNSVLKSRFTISRDTSKNTVYLQMNSLRAEDTAVYYCARQLTHYYVLAAWGQGTLVTVSS

SEQ ID NO: 934 - protein, 8 aa, Artificial Sequence
  Description of Artificial Sequence: Synthetic peptide
GFSSTNYH

SEQ ID NO: 935 - protein, 7 aa, Artificial Sequence
  Description of Artificial Sequence: Synthetic peptide
IWGDGDT

SEQ ID NO: 936 - protein, 12 aa, Artificial Sequence
  Description of Artificial Sequence: Synthetic peptide
ARQLTHYYVLAA

SEQ ID NO: 937 - protein, 111 aa, Artificial Sequence
  Description of Artificial Sequence: Synthetic polypeptide
DIVLTQSPATLSVSPGERATISCRASQRVSSSTYSYMHWYQQKPGQPPKLLIKYASNLESGVPARFSGSGSGTDFTLTISSVEPEDFATYYCQHSWEIPPTFGGGTKLEIK

SEQ ID NO: 938 - protein, 10 aa, Artificial Sequence
  Description of Artificial Sequence: Synthetic peptide
QRVSSSTYSY

SEQ ID NO: 939 - protein, 3 aa, Artificial Sequence
  Description of Artificial Sequence: Synthetic peptide
YAS

SEQ ID NO: 940 - protein, 9 aa, Artificial Sequence
  Description of Artificial Sequence: Synthetic peptide
QHSWEIPPT

SEQ ID NO: 941 - protein, 118 aa, Artificial Sequence
  Description of Artificial Sequence: Synthetic polypeptide
QVQLVQSGAEVVKPGASVKLSCKASGYIFTSYYMYWVKQAPGQGLEWIGEINPSNGDTNFNEKFKSKATLTVDKSASTAYMELSSLRSEDTAVYYCTRSDGRNDMDSWGQGTLVTVSS

SEQ ID NO: 942 - protein, 8 aa, Artificial Sequence
  Description of Artificial Sequence: Synthetic peptide
GYIFTSYY

SEQ ID NO: 943 - protein, 8 aa, Artificial Sequence
  Description of Artificial Sequence: Synthetic peptide
INPSNGDT

SEQ ID NO: 944 - protein, 11 aa, Artificial Sequence
  Description of Artificial Sequence: Synthetic peptide
TRSDGRNDMDS

SEQ ID NO: 945 - protein, 106 aa, Artificial Sequence
  Description of Artificial Sequence: Synthetic polypeptide
DFVMTQSPAFLSVTPGEKVTITCSAQSSVNYIHWYQQKPDQAPKKLIYDTSKLASGVPSRFSGSGSGTDYTFTISSLEAEDAATYYCQQWTTNPLTFGQGTKVEIK

SEQ ID NO: 946 - protein, 5 aa, Artificial Sequence
  Description of Artificial Sequence: Synthetic peptide
SSVNY

SEQ ID NO: 947 - protein, 3 aa, Artificial Sequence
  Description of Artificial Sequence: Synthetic peptide
DTS

SEQ ID NO: 948 - protein, 9 aa, Artificial Sequence
  Description of Artificial Sequence: Synthetic peptide
QQWTTNPLT

SEQ ID NO: 949 - protein, 119 aa, Artificial Sequence
  Description of Artificial Sequence: Synthetic polypeptide
QVQLQESGPGLVKPSETLSLTCTVSGFSLTNYGIHWIRQPPGKGLEWLGVIWARGFTNYNSALMSRLTISKDNSKNQVSLKLSSVTAADTAVYYCARANDGVYYAMDYWGQGTLVTVSS

SEQ ID NO: 950 - protein, 8 aa, Artificial Sequence
  Description of Artificial Sequence: Synthetic peptide
GFSLTNYG

SEQ ID NO: 951 - protein, 7 aa, Artificial Sequence
  Description of Artificial Sequence: Synthetic peptide
IWARGFT

SEQ ID NO: 952 - protein, 13 aa, Artificial Sequence
  Description of Artificial Sequence: Synthetic peptide
ARANDGVYYAMDY

SEQ ID NO: 953 - protein, 107 aa, Artificial Sequence [sequence omitted]

SEQ ID NO: 954 - protein, 6 aa, Artificial Sequence
  Description of Artificial Sequence: Synthetic peptide
QDISNY

SEQ ID NO: 955 - protein, 3 aa, Artificial Sequence
  Description of Artificial Sequence: Synthetic peptide
YTS

SEQ ID NO: 956 - protein, 9 aa, Artificial Sequence
  Description of Artificial Sequence: Synthetic peptide
QQGNTFPYT

SEQ ID NO: 957 - protein, 118 aa, Artificial Sequence [sequence omitted]

SEQ ID NO: 958 - protein, 8 aa, Artificial Sequence
  Description of Artificial Sequence: Synthetic peptide
GYTFSSFW

SEQ ID NO: 959 - protein, 8 aa, Artificial Sequence
  Description of Artificial Sequence: Synthetic peptide
INPRSGYT

SEQ ID NO: 960 - protein, 11 aa, Artificial Sequence
  Description of Artificial Sequence: Synthetic peptide
ASFLGRGAMDY

SEQ ID NO: 961 - protein, 107 aa, Artificial Sequence
  Description of Artificial Sequence: Synthetic polypeptide
DIQMTQSPSSLSASVGDRVTITCKASQNIDKYLNWYQQKPGKAPKLLIYNTNNLQTGVPSRFSGSGSGTDFTFTISSLQPEDIATYYCLQHISRPRTFGQGTKVEIK

SEQ ID NO: 962 - protein, 6 aa, Artificial Sequence
  Description of Artificial Sequence: Synthetic peptide
QNIDKY

SEQ ID NO: 963 - protein, 3 aa, Artificial Sequence
  Description of Artificial Sequence: Synthetic peptide
NTN

SEQ ID NO: 964 - protein, 9 aa, Artificial Sequence
  Description of Artificial Sequence: Synthetic peptide
LQHISRPRT

SEQ ID NO: 965 - protein, 121 aa, Artificial Sequence
  Description of Artificial Sequence: Synthetic polypeptide
QVQLQESGPGLVRPSQTLSLTCTVSGFTFTDFYMNWVRQPPGRGLEWIGFIRDKAKGYTTEYNPSVKGRVTMLVDTSKNQFSLRLSSVTAADTAVYYCAREGHTAAPFDYWGQGSLVTVSS

SEQ ID NO: 966 - protein, 8 aa, Artificial Sequence
  Description of Artificial Sequence: Synthetic peptide
GFTFTDFY

SEQ ID NO: 967 - protein, 10 aa, Artificial Sequence
  Description of Artificial Sequence: Synthetic peptide
IRDKAKGYTT

SEQ ID NO: 968 - protein, 12 aa, Artificial Sequence
  Description of Artificial Sequence: Synthetic peptide
AREGHTAAPFDY

SEQ ID NO: 969 - protein, 111 aa, Artificial Sequence
  Description of Artificial Sequence: Synthetic polypeptide
QSVLTQPPSASGTPGQRVTISCTGSSSNIGAGYDVHWYQQLPGTAPKLLIYDNNNRPSGVPDRFSGSKSGTSASLAISGLRSEDEADYYCQSYDSSLSAWLFGGGTKLTVL

SEQ ID NO: 970 - protein, 9 aa, Artificial Sequence
  Description of Artificial Sequence: Synthetic peptide
SSNIGAGYD

SEQ ID NO: 971 - protein, 3 aa, Artificial Sequence
  Description of Artificial Sequence: Synthetic peptide
DNN

SEQ ID NO: 972 - protein, 11 aa, Artificial Sequence
  Description of Artificial Sequence: Synthetic peptide
QSYDSSLSAWL

SEQ ID NO: 973 - protein, 117 aa, Artificial Sequence
  Description of Artificial Sequence: Synthetic polypeptide
EVQLLESGGGLVQPGGSLRLSCAASGFTFSNAWMSWVRQAPGKGLEWVAFIWYDGSNKYYADSVKGRFTISRDNSKNTLYLQMNSLRAEDTAVYYCARYSGWYFDYWGQGTLVTVSS

SEQ ID NO: 974 - protein, 8 aa, Artificial Sequence
  Description of Artificial Sequence: Synthetic peptide
GFTFSNAW

SEQ ID NO: 975 - protein, 8 aa, Artificial Sequence
  Description of Artificial Sequence: Synthetic peptide
IWYDGSNK

SEQ ID NO: 976 - protein, 10 aa, Artificial Sequence
  Description of Artificial Sequence: Synthetic peptide
ARYSGWYFDY

SEQ ID NO: 977 - protein, 112 aa, Artificial Sequence
  Description of Artificial Sequence: Synthetic polypeptide
DVVMTQSPLSLPVTLGQPASISCRSSQIIIHSDGNTYLEWFQQRPGQSPRRLIYKVSNRFSGVPDRFSGSGSGTDFTLKISRVEAEDVGVYYCFQGSHVPHTFGQGTKVEIK

SEQ ID NO: 978 - protein, 11 aa, Artificial Sequence
  Description of Artificial Sequence: Synthetic peptide
QIIIHSDGNTY

SEQ ID NO: 979 - protein, 3 aa, Artificial Sequence
  Description of Artificial Sequence: Synthetic peptide
KVS

SEQ ID NO: 980 - protein, 9 aa, Artificial Sequence
  Description of Artificial Sequence: Synthetic peptide
FQGSHVPHT

SEQ ID NO: 981 - protein, 118 aa, Artificial Sequence
  Description of Artificial Sequence: Synthetic polypeptide
QVQLVESGGGVVQPGRSLRLSCAASGFTFSSFGMHWVRQAPGKGLEWVAYISSGSFTIYYADSVKGRFTISRDNSKNTLYLQMNSLRAEDTAVYYCARMRKGYAMDYWGQGTLVTVSS

SEQ ID NO: 982 - protein, 8 aa, Artificial Sequence
  Description of Artificial Sequence: Synthetic peptide
GFTFSSFG

SEQ ID NO: 983 - protein, 8 aa, Artificial Sequence
  Description of Artificial Sequence: Synthetic peptide
ISSGSFTI

SEQ ID NO: 984 - protein, 11 aa, Artificial Sequence
  Description of Artificial Sequence: Synthetic peptide
ARMRKGYAMDY

SEQ ID NO: 985 - protein, 107 aa, Artificial Sequence
  Description of Artificial Sequence: Synthetic polypeptide
EIVLTQSPATLSLSPGERATLSCQASQSISNFLHWYQQRPGQAPRLLIRYRSQSISGIPARFSGSGSGTDFTLTISSLEPEDFAVYYCQQSGSWPLTFGGGTKVEIK

SEQ ID NO: 986 - protein, 6 aa, Artificial Sequence
  Description of Artificial Sequence: Synthetic peptide
QSISNF

SEQ ID NO: 987 - protein, 3 aa, Artificial Sequence
  Description of Artificial Sequence: Synthetic peptide
YRS

SEQ ID NO: 988 - protein, 9 aa, Artificial Sequence
  Description of Artificial Sequence: Synthetic peptide
QQSGSWPLT

SEQ ID NO: 989 - protein, 117 aa, Artificial Sequence
  Description of Artificial Sequence: Synthetic polypeptide
QVQLVESGGGVVQPGRSLRLSCAASGFTFSSYDMSWVRQAPGKGLEWVAKVSSGGGSTYYLDTVQGRFTISRDNSKNTLYLQMNSLRAEDTAVYYCARHLHGSFASWGQGTTVTVSS

SEQ ID NO: 990 - protein, 8 aa, Artificial Sequence
  Description of Artificial Sequence: Synthetic peptide
GFTFSSYD

SEQ ID NO: 991 - protein, 8 aa, Artificial Sequence
  Description of Artificial Sequence: Synthetic peptide
VSSGGGST

SEQ ID NO: 992 - protein, 10 aa, Artificial Sequence
  Description of Artificial Sequence: Synthetic peptide
ARHLHGSFAS

SEQ ID NO: 993 - protein, 110 aa, Artificial Sequence
  Description of Artificial Sequence: Synthetic polypeptide
QAVVTQEPSLTVSPGGTVTLTCGLKSGSVTSDNFPTWYQQTPGQAPRLLIYNTNTRHSGVPDRFSGSILGNKAALTITGAQADDEAEYFCALFISNPSVEFGGGTQLTVL

SEQ ID NO: 994 - protein, 9 aa, Artificial Sequence
  Description of Artificial Sequence: Synthetic peptide
SGSVTSDNF

SEQ ID NO: 995 - protein, 3 aa, Artificial Sequence
  Description of Artificial Sequence: Synthetic peptide
NTN

SEQ ID NO: 996 - protein, 13 aa, Artificial Sequence
  Description of Artificial Sequence: Synthetic peptide
ALFISNPSVEFGG

SEQ ID NO: 997 - protein, 122 aa, Artificial Sequence
  Description of Artificial Sequence: Synthetic polypeptide
EVQLVESGGGLVQPGGSLRLSCAASGFTFSVYYMNWVRQAPGKGLEWVSDINNEGGTTYYADSVKGRFTISRDNSKNSLYLQMNSLRAEDTAVYYCARDAGYSNHVPIFDSWGQGTLVTVSS

SEQ ID NO: 998 - protein, 8 aa, Artificial Sequence
  Description of Artificial Sequence: Synthetic peptide
GFTFSVYY

SEQ ID NO: 999 - protein, 8 aa, Artificial Sequence
  Description of Artificial Sequence: Synthetic peptide
INNEGGTT

SEQ ID NO: 1000 - protein, 15 aa, Artificial Sequence
  Description of Artificial Sequence: Synthetic peptide
ARDAGYSNHVPIFDS

SEQ ID NO: 1001 - protein, 110 aa, Artificial Sequence
  Description of Artificial Sequence: Synthetic polypeptide
QSVLTQPPSASGTPGQRVTISCSGSLSNIGRNPVNWYQQLPGTAPKLLIYLDNLRLSGVPDRFSGSKSGTSASLAISGLQSEDEADYYCATWDDSHPGWTFGGGTKLTVL

SEQ ID NO: 1002 - protein, 8 aa, Artificial Sequence
  Description of Artificial Sequence: Synthetic peptide
LSNIGRNP

SEQ ID NO: 1003 - protein, 3 aa, Artificial Sequence
  Description of Artificial Sequence: Synthetic peptide
LDN

SEQ ID NO: 1004 - protein, 11 aa, Artificial Sequence
  Description of Artificial Sequence: Synthetic peptide
ATWDDSHPGWT

SEQ ID NO: 1005 - protein, 117 aa, Artificial Sequence
  Description of Artificial Sequence: Synthetic polypeptide
EVQLLESGGGLVQPGGSLRLSCAASGFTFSSYAYSWVRQAPGKGLEWVSAISGSGGRTYYADSVKGRFTISRDNSKNTLYLQMNSLRAEDTAVYYCARLGYGRVDEWGRGTLVTVSS

SEQ ID NO: 1006 - protein, 8 aa, Artificial Sequence
  Description of Artificial Sequence: Synthetic peptide
GFTFSSYA

SEQ ID NO: 1007 - protein, 8 aa, Artificial Sequence
  Description of Artificial Sequence: Synthetic peptide
ISGSGGRT

SEQ ID NO: 1008 - protein, 10 aa, Artificial Sequence
  Description of Artificial Sequence: Synthetic peptide
ARLGYGRVDE

SEQ ID NO: 1009 - protein, 112 aa, Artificial Sequence
  Description of Artificial Sequence: Synthetic polypeptide
DIQLTQSPLSLPVTLGQPASISCRSSQSLVHRNGNTYLHWFQQRPGQSPRLLIYTVSNRFSGVPDRFSGSGSGTDFTLKISRVEAEDVGVYFCSQSSHVPPTFGAGTRLEIK

SEQ ID NO: 1010 - protein, 11 aa, Artificial Sequence
  Description of Artificial Sequence: Synthetic peptide
QSLVHRNGNTY

SEQ ID NO: 1011 - protein, 3 aa, Artificial Sequence
  Description of Artificial Sequence: Synthetic peptide
TVS

SEQ ID NO: 1012 - protein, 9 aa, Artificial Sequence
  Description of Artificial Sequence: Synthetic peptide
SQSSHVPPT

SEQ ID NO: 1013 - protein, 120 aa, Artificial Sequence
  Description of Artificial Sequence: Synthetic polypeptide
QVQLQQSGSELKKPGASVKVSCKASGYTFTNYGVNWIKQAPGQGLQWMGWINPNTGEPTFDDDFKGRFAFSLDTSVSTAYLQISSLKADDTAVYFCSRSRGKNEAWFAYWGQGTLVTVSS

SEQ ID NO: 1014 - protein, 8 aa, Artificial Sequence
  Description of Artificial Sequence: Synthetic peptide
GYTFTNYG

SEQ ID NO: 1015 - protein, 8 aa, Artificial Sequence
  Description of Artificial Sequence: Synthetic peptide
INPNTGEP

SEQ ID NO: 1016 - protein, 13 aa, Artificial Sequence
  Description of Artificial Sequence: Synthetic peptide
SRSRGKNEAWFAY

SEQ ID NO: 1017 - protein, 106 aa, Artificial Sequence
  Description of Artificial Sequence: Synthetic polypeptide
QTVLSQSPAILSASPGEKVTMTCRASSSVTYIHWYQQKPGSSPKSWIYATSNLASGVPARFSGSGSGTSYSLTISRVEAEDAATYYCQHWSSKPPTFGGGTKLEIK

SEQ ID NO: 1018 - protein, 5 aa, Artificial Sequence
  Description of Artificial Sequence: Synthetic peptide
SSVTY

SEQ ID NO: 1019 - protein, 3 aa, Artificial Sequence
  Description of Artificial Sequence: Synthetic peptide
ATS

SEQ ID NO: 1020 - protein, 9 aa, Artificial Sequence
  Description of Artificial Sequence: Synthetic peptide
QHWSSKPPT

SEQ ID NO: 1021 - protein, 121 aa, Artificial Sequence
  Description of Artificial Sequence: Synthetic polypeptide
EVKLVESGGGLVQPGGSLRLSCATSGFTFTDYYMNWVRQPPGKALEWLGFIGNKANGYTTEYSASVKGRFTISRDKSQSILYLQMNTLRAEDSATYYCTRDRGLRFYFDYWGQGTTLTVSS

SEQ ID NO: 1022 - protein, 8 aa, Artificial Sequence
  Description of Artificial Sequence: Synthetic peptide
GFTFTDYY

SEQ ID NO: 1023 - protein, 10 aa, Artificial Sequence
  Description of Artificial Sequence: Synthetic peptide
IGNKANGYTT

SEQ ID NO: 1024 - protein, 12 aa, Artificial Sequence
  Description of Artificial Sequence: Synthetic peptide
TRDRGLRFYFDY

SEQ ID NO: 1025 - protein, 106 aa, Artificial Sequence
  Description of Artificial Sequence: Synthetic polypeptide
DIQLTQSPSSLSASVGDRVTITCKASQDVGTSVAWYQQKPGKAPKLLIYWTSTRHTGVPSRFSGSGSGTDFTFTISSLQPEDIATYYCQQYSLYRSFGQGTKVEIK

SEQ ID NO: 1026 - protein, 6 aa, Artificial Sequence
  Description of Artificial Sequence: Synthetic peptide
QDVGTS

SEQ ID NO: 1027 - protein, 3 aa, Artificial Sequence
  Description of Artificial Sequence: Synthetic peptide
WTS

SEQ ID NO: 1028 - protein, 8 aa, Artificial Sequence
  Description of Artificial Sequence: Synthetic peptide
QQYSLYRS

SEQ ID NO: 1029 - protein, 119 aa, Artificial Sequence
  Description of Artificial Sequence: Synthetic polypeptide
EVQLVESGGGVVQPGRSLRLSCSASGFDFTTYWMSWVRQAPGKGLEWIGEIHPDSSTINYAPSLKDRFTISRDNAKNTLFLQMDSLRPEDTGVYFCASLYFGFPWFAYWGQGTPVTVSS

SEQ ID NO: 1030 - protein, 8 aa, Artificial Sequence
  Description of Artificial Sequence: Synthetic peptide
GFDFTTYW

SEQ ID NO: 1031 - protein, 8 aa, Artificial Sequence
  Description of Artificial Sequence: Synthetic peptide
IHPDSSTI

SEQ ID NO: 1032 - protein, 12 aa, Artificial Sequence
  Description of Artificial Sequence: Synthetic peptide
ASLYFGFPWFAY

SEQ ID NO: 1033 - protein, 113 aa, Artificial Sequence
  Description of Artificial Sequence: Synthetic polypeptide
DIVMTQSPSSLTVTAGEKVTMSCKSSQSLLNSGNQKNYLTWYQQKPGQPPKLLIYWASTRESGVPDRFTGSGSGTDFTLTISSVQAEDLAVYYCQNDYSYPFTFGSGTKLEIK

SEQ ID NO: 1034 - protein, 12 aa, Artificial Sequence
  Description of Artificial Sequence: Synthetic peptide
QSLLNSGNQKNY

SEQ ID NO: 1035 - protein, 3 aa, Artificial Sequence
  Description of Artificial Sequence: Synthetic peptide
WAS

SEQ ID NO: 1036 - protein, 9 aa, Artificial Sequence
  Description of Artificial Sequence: Synthetic peptide
QNDYSYPFT

SEQ ID NO: 1037 - protein, 118 aa, Artificial Sequence
  Description of Artificial Sequence: Synthetic polypeptide
QVQLQQPGAELVRPGASVKLSCKASGYTFTSYWINWVKQRPGQGLEWIGNIYPSDSYTNYNQKFKDKATLTVDKSSSTAYMQLSSPTSEDSAVYYCTRSWRGNSFDYWGQGTTLTVSS

SEQ ID NO: 1038 - protein, 8 aa, Artificial Sequence
  Description of Artificial Sequence: Synthetic peptide
GYTFTSYW

SEQ ID NO: 1039 - protein, 8 aa, Artificial Sequence
  Description of Artificial Sequence: Synthetic peptide
IYPSDSYT

SEQ ID NO: 1040 - protein, 11 aa, Artificial Sequence
  Description of Artificial Sequence: Synthetic peptide
TRSWRGNSFDY

SEQ ID NO: 1041 - protein, 113 aa, Artificial Sequence [sequence omitted]

SEQ ID NO: 1042 - protein, 12 aa, Artificial Sequence
  Description of Artificial Sequence: Synthetic peptide
QSLLYTSSQKNY

SEQ ID NO: 1043 - protein, 3 aa, Artificial Sequence
  Description of Artificial Sequence: Synthetic peptide
WAS

SEQ ID NO: 1044 - protein, 9 aa, Artificial Sequence
  Description of Artificial Sequence: Synthetic peptide
QQYYAYPWT

SEQ ID NO: 1045 - protein, 119 aa, Artificial Sequence [sequence omitted]

SEQ ID NO: 1046 - protein, 8 aa, Artificial Sequence
  Description of Artificial Sequence: Synthetic peptide
GYTFTSYW

SEQ ID NO: 1047 - protein, 8 aa, Artificial Sequence
  Description of Artificial Sequence: Synthetic peptide
IDPSNSDT

SEQ ID NO: 1048 - protein, 12 aa, Artificial Sequence
  Description of Artificial Sequence: Synthetic peptide
ATYRSYVTPLDY

SEQ ID NO: 1049 - protein, 110 aa, Artificial Sequence
  Description of Artificial Sequence: Synthetic polypeptide
QSVLTQPPSVSAAPGQKVTISCSGSSSNIGNNYVSWYQQLPGTAPKLLIYDNNKRPSGIPDRFSGSKSGTSTTLGITGLQTGDEADYYCGTWDSRLSAVVFGGGTKLTVL

SEQ ID NO: 1050 - protein, 8 aa, Artificial Sequence
  Description of Artificial Sequence: Synthetic peptide
SSNIGNNY

SEQ ID NO: 1051 - protein, 3 aa, Artificial Sequence
  Description of Artificial Sequence: Synthetic peptide
DNN

SEQ ID NO: 1052 - protein, 11 aa, Artificial Sequence
  Description of Artificial Sequence: Synthetic peptide
GTWDSRLSAVV

SEQ ID NO: 1053 - protein, 130 aa, Artificial Sequence [sequence omitted]

SEQ ID NO: 1054 - protein, 8 aa, Artificial Sequence
  Description of Artificial Sequence: Synthetic peptide
GFTFSSFG

SEQ ID NO: 1055 - protein, 8 aa, Artificial Sequence
  Description of Artificial Sequence: Synthetic peptide
ISFDGSIK

SEQ ID NO: 1056 - protein, 23 aa, Artificial Sequence
  Description of Artificial Sequence: Synthetic peptide
ARDRLNYYDSSGYYHYKYYGMAV

SEQ ID NO: 1057 - protein, 112 aa, Artificial Sequence
  Description of Artificial Sequence: Synthetic polypeptide
DVVMTQSPLSLPVTLGQPASISCKSSQSLLYTDGKTYLYWFLQRPGQSPRRLIYLVSKLDSGVPDRFSGSGSGTDFTLKISRVEAEDVGVYYCLQSTHFPHTFGGGTKVEIK

SEQ ID NO: 1058 - protein, 11 aa, Artificial Sequence
  Description of Artificial Sequence: Synthetic peptide
QSLLYTDGKTY

SEQ ID NO: 1059 - protein, 3 aa, Artificial Sequence
  Description of Artificial Sequence: Synthetic peptide
LVS

SEQ ID NO: 1060 - protein, 9 aa, Artificial Sequence
  Description of Artificial Sequence: Synthetic peptide
LQSTHFPHT

SEQ ID NO: 1061 - protein, 122 aa, Artificial Sequence
  Description of Artificial Sequence: Synthetic polypeptide
QVQLQESGPGLVKPSETLSLTCTVSGFSLTSYIVDWIRQPPGKGLEWIGVIWAGGSTGYNSALRSRVSITKDTSKNQFSLKLSSVTAADTAVYYCASAAYYSYYNYDGFAYWGQGTLVTVSS

SEQ ID NO: 1062 - protein, 8 aa, Artificial Sequence
  Description of Artificial Sequence: Synthetic peptide
GFSLTSYI

SEQ ID NO: 1063 - protein, 7 aa, Artificial Sequence
  Description of Artificial Sequence: Synthetic peptide
IWAGGST

SEQ ID NO: 1064 - protein, 16 aa, Artificial Sequence
  Description of Artificial Sequence: Synthetic peptide
ASAAYYSYYNYDGFAY

SEQ ID NO: 1065 - protein, 107 aa, Artificial Sequence
  Description of Artificial Sequence: Synthetic polypeptide
EIVMTQSPATLSVSPGERATLSCKASQSVSNDVVWYQQKPGQAPRLLIYYASNRYTGIPARFSGSGSGTEFTLTISSLQSEDFAVYYCQQDYTSPWTFGQGTKLEIK

SEQ ID NO: 1066 - protein, 6 aa, Artificial Sequence
  Description of Artificial Sequence: Synthetic peptide
QSVSND

SEQ ID NO: 1067 - protein, 3 aa, Artificial Sequence
  Description of Artificial Sequence: Synthetic peptide
YAS

SEQ ID NO: 1068 - protein, 9 aa, Artificial Sequence
  Description of Artificial Sequence: Synthetic peptide
QQDYTSPWT

SEQ ID NO: 1069 - protein, 118 aa, Artificial Sequence
  Description of Artificial Sequence: Synthetic polypeptide
QVQLVQSGAEVKKPGASVKVSCKASGYTFTNYGMNWVRQAPGQGLEWMGWINTYTGEPTYADDFKGRVTMTTDTSTSTAYMELRSLRSDDTAVYYCARIGDSSPSDYWGQGTLVTVSS

SEQ ID NO: 1070 - protein, 8 aa, Artificial Sequence
  Description of Artificial Sequence: Synthetic peptide
GYTFTNYG

SEQ ID NO: 1071 - protein, 8 aa, Artificial Sequence
  Description of Artificial Sequence: Synthetic peptide
INTYTGEP

SEQ ID NO: 1072 - protein, 11 aa, Artificial Sequence
  Description of Artificial Sequence: Synthetic peptide
ARIGDSSPSDY

SEQ ID NO: 1073 - protein, 107 aa, Artificial Sequence
  Description of Artificial Sequence: Synthetic polypeptide
EIVLTQSPATLSLSPGERATLSCRASQSVSSYLAWYQQKPGQAPRLLIYDASNRATGIPARFSGSGSGTDFTLTISSLEPEDFAVYYCQHRSNWPPTFGGGTKVEIK

SEQ ID NO: 1074 - protein, 6 aa, Artificial Sequence
  Description of Artificial Sequence: Synthetic peptide
QSVSSY

SEQ ID NO: 1075 - protein, 3 aa, Artificial Sequence
  Description of Artificial Sequence: Synthetic peptide
DAS

SEQ ID NO: 1076 - protein, 9 aa, Artificial Sequence
  Description of Artificial Sequence: Synthetic peptide
QHRSNWPPT

SEQ ID NO: 1077 - protein, 123 aa, Artificial Sequence
  Description of Artificial Sequence: Synthetic polypeptide
QVQLVESGGGVVQPGRSLRLSCAASGFTFSSYGMHWVRQAPGKGLEWVSFLWYDGTNKNYVESVKGRFTISRDNSKNMLYLEMNSLRAEDTAVYYCARDHDFRSGYEGWFDPWGQGTLVTVSS

SEQ ID NO: 1078 - protein, 8 aa, Artificial Sequence
  Description of Artificial Sequence: Synthetic peptide
GFTFSSYG

SEQ ID NO: 1079 - protein, 8 aa, Artificial Sequence
  Description of Artificial Sequence: Synthetic peptide
LWYDGTNK

SEQ ID NO: 1080 - protein, 16 aa, Artificial Sequence
  Description of Artificial Sequence: Synthetic peptide
ARDHDFRSGYEGWFDP

SEQ ID NO: 1081 - protein, 111 aa, Artificial Sequence
  Description of Artificial Sequence: Synthetic polypeptide
DIVMTQSPDSLAVSLGERATISCRASESVDNYGISFMKWFQQKPGQPPKLLIYAASNQGSGVPDRFSGSGSGTDFTLTISSLQAEDVAVYYCQQSKEVPWTFGGGTKVEIK

SEQ ID NO: 1082 - protein, 10 aa, Artificial Sequence
  Description of Artificial Sequence: Synthetic peptide
ESVDNYGISF

SEQ ID NO: 1083 - protein, 3 aa, Artificial Sequence
  Description of Artificial Sequence: Synthetic peptide
AAS

SEQ ID NO: 1084 - protein, 9 aa, Artificial Sequence
  Description of Artificial Sequence: Synthetic peptide
QQSKEVPWT

SEQ ID NO: 1085 - protein, 119 aa, Artificial Sequence
  Description of Artificial Sequence: Synthetic polypeptide
QVQLVQSGAEVKKPGASVKISCKASGYSFTAYYIHWVKQAPGQGLEWIGYISSYNGATNYNQKFKGRVTFTTDTSTSTAYMELRSLRSDDTAVYYCARDYDYDVGMDYWGQGTLVTVSS

SEQ ID NO: 1086 - protein, 8 aa, Artificial Sequence
  Description of Artificial Sequence: Synthetic peptide
GYSFTAYY

SEQ ID NO: 1087 - protein, 8 aa, Artificial Sequence
  Description of Artificial Sequence: Synthetic peptide
ISSYNGAT

SEQ ID NO: 1088 - protein, 12 aa, Artificial Sequence
  Description of Artificial Sequence: Synthetic peptide
ARDYDYDVGMDY

SEQ ID NO: 1089 - protein, 108 aa, Artificial Sequence
  Description of Artificial Sequence: Synthetic polypeptide
ENVLTQSPAIMSASPGEKVTMTCRASSSVSSSYLHWYQQKSGASPKLWIYSTSNLASGVPARFSGSGSGTSYSLTISSVEAEDAATYYCQQYSGYPLTFGGGTKLEIK

SEQ ID NO: 1090 - protein, 7 aa, Artificial Sequence
  Description of Artificial Sequence: Synthetic peptide
SSVSSSY

SEQ ID NO: 1091 - protein, 3 aa, Artificial Sequence
  Description of Artificial Sequence: Synthetic peptide
STS

SEQ ID NO: 1092 - protein, 9 aa, Artificial Sequence
  Description of Artificial Sequence: Synthetic peptide
QQYSGYPLT

SEQ ID NO: 1093 - protein, 120 aa, Artificial Sequence
  Description of Artificial Sequence: Synthetic polypeptide
QVQLKESGPGLVAPSQSLSITCTVSGFSLTDYGVRWIRQPPGKGLEWLGVIWGGGSTYYNSALKSRLSISKDNSKSQVFLKMNSLQTDDTAMYYCAKEKRRGYYYAMDYWGQGTSVTVSS

SEQ ID NO: 1094 - protein, 8 aa, Artificial Sequence
  Description of Artificial Sequence: Synthetic peptide
GFSLTDYG

SEQ ID NO: 1095 - protein, 7 aa, Artificial Sequence
  Description of Artificial Sequence: Synthetic peptide
IWGGGST

SEQ ID NO: 1096 - protein, 14 aa, Artificial Sequence
  Description of Artificial Sequence: Synthetic peptide
AKEKRRGYYYAMDY

SEQ ID NO: 1097 - protein, 107 aa, Artificial Sequence
  Description of Artificial Sequence: Synthetic polypeptide
DILLTQSPVILSVSPGERVSFSCRASQSIGTNIHWYQQRTNGSPRLLIKYASESISGIPSRFSGSGSGTDFTLSINSVESEDIADYYCQQNNNWPTTFGAGTKLELK

SEQ ID NO: 1098 - protein, 6 aa, Artificial Sequence
  Description of Artificial Sequence: Synthetic peptide
QSIGTN

SEQ ID NO: 1099 - protein, 3 aa, Artificial Sequence
  Description of Artificial Sequence: Synthetic peptide
YAS

SEQ ID NO: 1100 - protein, 9 aa, Artificial Sequence
  Description of Artificial Sequence: Synthetic peptide
QQNNNWPTT

SEQ ID NO: 1101 - protein, 119 aa, Artificial Sequence
  Description of Artificial Sequence: Synthetic polypeptide
QVQLKQSGPGLVQPSQSLSITCTVSGFSLTNYGVHWVRQSPGKGLEWLGVIWSGGNTDYNTPFTSRLSINKDNSKSQVFFKMNSLQSNDTAIYYCARALTYYDYEFAYWGQGTLVTVSA

SEQ ID NO: 1102 - protein, 8 aa, Artificial Sequence
  Description of Artificial Sequence: Synthetic peptide
GFSLTNYG

SEQ ID NO: 1103 - protein, 7 aa, Artificial Sequence
  Description of Artificial Sequence: Synthetic peptide
IWSGGNT

SEQ ID NO: 1104 - protein, 13 aa, Artificial Sequence
  Description of Artificial Sequence: Synthetic peptide
ARALTYYDYEFAY

SEQ ID NO: 1105 - protein, 107 aa, Artificial Sequence [sequence omitted]

SEQ ID NO: 1106 - protein, 6 aa, Artificial Sequence
  Description of Artificial Sequence: Synthetic peptide
QDISNY

SEQ ID NO: 1107 - protein, 3 aa, Artificial Sequence
  Description of Artificial Sequence: Synthetic peptide
DAS

SEQ ID NO: 1108 - protein, 9 aa, Artificial Sequence
  Description of Artificial Sequence: Synthetic peptide
QHFDHLPLA

SEQ ID NO: 1109 - protein, 119 aa, Artificial Sequence [sequence omitted]

SEQ ID NO: 1110 - protein, 10 aa, Artificial Sequence
  Description of Artificial Sequence: Synthetic peptide
GGSVSSGDYY

SEQ ID NO: 1111 - protein, 7 aa, Artificial Sequence
  Description of Artificial Sequence: Synthetic peptide
IYYSGNT

SEQ ID NO: 1112 - protein, 11 aa, Artificial Sequence
  Description of Artificial Sequence: Synthetic peptide
VRDRVTGAFDI

SEQ ID NO: 1113 - protein, 108 aa, Artificial Sequence
  Description of Artificial Sequence: Synthetic polypeptide
EIVMTQSPATLSLSPGERATLSCRASQSVSSYLAWYQQKPGQAPRLLIYDASNRATGIPARFSGSGSGTDFTLTISSLEPEDFAVYYCHQYGSTPLTFGGGTKAEIKR

SEQ ID NO: 1114 - protein, 6 aa, Artificial Sequence
  Description of Artificial Sequence: Synthetic peptide
QSVSSY

SEQ ID NO: 1115 - protein, 3 aa, Artificial Sequence
  Description of Artificial Sequence: Synthetic peptide
DAS

SEQ ID NO: 1116 - protein, 9 aa, Artificial Sequence
  Description of Artificial Sequence: Synthetic peptide
HQYGSTPLT

SEQ ID NO: 1117 - protein, 121 aa, Artificial Sequence [sequence omitted]

SEQ ID NO: 1118 - protein, 10 aa, Artificial Sequence
  Description of Artificial Sequence: Synthetic peptide
GGSISSGDYY

SEQ ID NO: 1119 - protein, 7 aa, Artificial Sequence
  Description of Artificial Sequence: Synthetic peptide
IYYSGST

SEQ ID NO: 1120 - protein, 13 aa, Artificial Sequence
  Description of Artificial Sequence: Synthetic peptide
ARVSIFGVGTFDY

SEQ ID NO: 1121 - protein, 112 aa, Artificial Sequence [sequence omitted]

SEQ ID NO: 1122 - protein, 11 aa, Artificial Sequence
  Description of Artificial Sequence: Synthetic peptide
QNIVHSNGNTY

SEQ ID NO: 1123 - protein, 3 aa, Artificial Sequence
  Description of Artificial Sequence: Synthetic peptide
KVS

SEQ ID NO: 1124 - protein, 9 aa, Artificial Sequence
  Description of Artificial Sequence: Synthetic peptide
FQYSHVPWT

SEQ ID NO: 1125 - protein, 123 aa, Artificial Sequence
  Description of Artificial Sequence: Synthetic polypeptide
QVQLQQSGAEVKKPGSSVKVSCKASGYTFTNYYIYWVRQAPGQGLEWIGGINPTSGGSNFNEKFKTRVTITVDESTNTAYMELSSLRSEDTAFYFCARQGLWFDSDGRGFDFWGQGSTVTVSS

SEQ ID NO: 1126 - protein, 8 aa, Artificial Sequence
  Description of Artificial Sequence: Synthetic peptide
GYTFTNYY

SEQ ID NO: 1127 - protein, 8 aa, Artificial Sequence
  Description of Artificial Sequence: Synthetic peptide
INPTSGGS

SEQ ID NO: 1128 - protein, 17 aa, Artificial Sequence
  Description of Artificial Sequence: Synthetic peptide
ARQGLWFDSDGRGFDFW

SEQ ID NO: 1129 - protein, 107 aa, Artificial Sequence
  Description of Artificial Sequence: Synthetic polypeptide
IQLTQSPSSLSASVGDRVTITCRASQDISSALVWYQQKPGKAPKLLIYDASSLESGVPSARFSGSESGTDFTLTISSLQPEDFATYYCQQFNSYPLTFGGGTKVEIK

SEQ ID NO: 1130 - protein, 6 aa, Artificial Sequence
  Description of Artificial Sequence: Synthetic peptide
QDISSA

SEQ ID NO: 1131 - protein, 3 aa, Artificial Sequence
  Description of Artificial Sequence: Synthetic peptide
DAS

SEQ ID NO: 1132 - protein, 9 aa, Artificial Sequence
  Description of Artificial Sequence: Synthetic peptide
QQFNSYPLT

SEQ ID NO: 1133 - protein, 125 aa, Artificial Sequence [sequence omitted]

SEQ ID NO: 1134 - protein, 8 aa, Artificial Sequence
  Description of Artificial Sequence: Synthetic peptide
GFTFSTYG

SEQ ID NO: 1135 - protein, 8 aa, Artificial Sequence
  Description of Artificial Sequence: Synthetic peptide
IWDDGSYK

SEQ ID NO: 1136 - protein, 18 aa, Artificial Sequence
  Description of Artificial Sequence: Synthetic peptide
ARDGITMVRGVMKDYFDY

SEQ ID NO: 1137 - protein, 107 aa, Artificial Sequence
  Description of Artificial Sequence: Synthetic polypeptide
DIQMTQSPSSLSASVGDRVTITCRASQDINNYLAWYQHKPGKGPKLLIHYTSTLHPGIPSRFSGSGSGRDYSFSISSLEPEDIATYYCLQYDNLLYTFGQGTKLEIK

SEQ ID NO: 1138 - protein, 6 aa, Artificial Sequence
  Description of Artificial Sequence: Synthetic peptide
QDINNY

SEQ ID NO: 1139 - protein, 3 aa, Artificial Sequence
  Description of Artificial Sequence: Synthetic peptide
YTS

SEQ ID NO: 1140 - protein, 9 aa, Artificial Sequence
  Description of Artificial Sequence: Synthetic peptide
LQYDNLLYT

SEQ ID NO: 1141 - protein, 119 aa, Artificial Sequence
  Description of Artificial Sequence: Synthetic polypeptide
QVQLVQSGAEVAKPGASVKLSCKASGYTFTSYWMQWVKQRPGQGLECIGTIYPGDGDTTYTQKFQGKATLTADKSSSTAYMQLSSLRSEDSAVYYCARYDAPGYAMDYWGQGTLVTVSS

SEQ ID NO: 1142 - protein, 8 aa, Artificial Sequence
  Description of Artificial Sequence: Synthetic peptide
GYTFTSYW

SEQ ID NO: 1143 - protein, 8 aa, Artificial Sequence
  Description of Artificial Sequence: Synthetic peptide
IYPGDGDT

SEQ ID NO: 1144 - protein, 12 aa, Artificial Sequence
  Description of Artificial Sequence: Synthetic peptide
ARYDAPGYAMDY

SEQ ID NO: 1145 - protein, 106 aa, Artificial Sequence [sequence omitted]

SEQ ID NO: 1146 - protein, 5 aa, Artificial Sequence
  Description of Artificial Sequence: Synthetic peptide
SSVTY

SEQ ID NO: 1147 - protein, 3 aa, Artificial Sequence
  Description of Artificial Sequence: Synthetic peptide
DTS

SEQ ID NO: 1148 - protein, 9 aa, Artificial Sequence
  Description of Artificial Sequence: Synthetic peptide
QQWSSHIFT

SEQ ID NO: 1149 - protein, 121 aa, Artificial Sequence [sequence omitted]

SEQ ID NO: 1150 - protein, 8 aa, Artificial Sequence
  Description of Artificial Sequence: Synthetic peptide
GYTFTSHW

SEQ ID NO: 1151 - protein, 8 aa, Artificial Sequence
  Description of Artificial Sequence: Synthetic peptide
FNPSNGRT

SEQ ID NO: 1152 - protein, 14 aa, Artificial Sequence
  Description of Artificial Sequence: Synthetic peptide
ASRDYDYDGRYFDY

SEQ ID NO: 1153 - protein, 106 aa, Artificial Sequence [sequence omitted]

SEQ ID NO: 1154 - protein, 6 aa, Artificial Sequence
  Description of Artificial Sequence: Synthetic peptide
QGINNY

SEQ ID NO: 1155 - protein, 3 aa, Artificial Sequence
  Description of Artificial Sequence: Synthetic peptide
NTN

SEQ ID NO: 1156 - protein, 8 aa, Artificial Sequence
  Description of Artificial Sequence: Synthetic peptide
LQHNSFPT

SEQ ID NO: 1157 - protein, 120 aa, Artificial Sequence [sequence omitted]

SEQ ID NO: 1158 - protein, 8 aa, Artificial Sequence
  Description of Artificial Sequence: Synthetic peptide
GFTFTDYK

SEQ ID NO: 1159 - protein, 8 aa, Artificial Sequence
  Description of Artificial Sequence: Synthetic peptide
FNPNSGYS

SEQ ID NO: 1160 - protein, 14 aa, Artificial Sequence
  Description of Artificial Sequence: Synthetic peptide
ARLSPGGYYVMDAW

SEQ ID NO: 1161 - protein, 107 aa, Artificial Sequence [sequence omitted]

SEQ ID NO: 1162 - protein, 6 aa, Artificial Sequence
  Description of Artificial Sequence: Synthetic peptide
QNIATD

SEQ ID NO: 1163 - protein, 3 aa, Artificial Sequence
  Description of Artificial Sequence: Synthetic peptide
SAS

SEQ ID NO: 1164 - protein, 9 aa, Artificial Sequence
  Description of Artificial Sequence: Synthetic peptide
QQSEPEPYT

SEQ ID NO: 1165 - protein, 121 aa, Artificial Sequence [sequence omitted]

SEQ ID NO: 1166 - protein, 8 aa, Artificial Sequence
  Description of Artificial Sequence: Synthetic peptide
GFTLSGDW

SEQ ID NO: 1167 - protein, 8 aa, Artificial Sequence
  Description of Artificial Sequence: Synthetic peptide
ISAAGGYT

SEQ ID NO: 1168 - protein, 14 aa, Artificial Sequence
  Description of Artificial Sequence: Synthetic peptide
ARESRVSFEAAMDY

SEQ ID NO: 1169 - protein, 108 aa, Artificial Sequence
  Description of Artificial Sequence: Synthetic polypeptide
DILMTQSPSSMSVSLGDTVSITCHSSQDINSNIGWLQQRPGKSFKGLIYHGTNLDDEVPSRFSGSGSGADYSLTISSLESEDFADYYCVQYAQFPWTFGGGTKLEIKA

SEQ ID NO: 1170 - protein, 6 aa, Artificial Sequence
  Description of Artificial Sequence: Synthetic peptide
QDINSN

SEQ ID NO: 1171 - protein, 3 aa, Artificial Sequence
  Description of Artificial Sequence: Synthetic peptide
HGT

SEQ ID NO: 1172 - protein, 9 aa, Artificial Sequence
  Description of Artificial Sequence: Synthetic peptide
VQYAQFPWT

SEQ ID NO: 1173 - protein, 116 aa, Artificial Sequence
  Description of Artificial Sequence: Synthetic polypeptide
DVQLQESGPSLVKPSQSLSLTCTVTGYSITSDFAWNWIRQFPGNKLEWMGYISYSGNTRYNPSLKSRISITRDTSKNQFFLQLNSVTIEDTATYYCVTAGRGFPYWGQGTLVTVSS

SEQ ID NO: 1174 - protein, 9 aa, Artificial Sequence
  Description of Artificial Sequence: Synthetic peptide
GYSITSDFA

SEQ ID NO: 1175 - protein, 7 aa, Artificial Sequence
  Description of Artificial Sequence: Synthetic peptide
ISYSGNT

SEQ ID NO: 1176 - protein, 9 aa, Artificial Sequence
  Description of Artificial Sequence: Synthetic peptide
VTAGRGFPY

SEQ ID NO: 1177 - protein, 107 aa, Artificial Sequence
  Description of Artificial Sequence: Synthetic polypeptide
DIQMTQSPSSMSVSVGDRVTITCHSSQDINSNIGWLQQKPGKSFKGLIYHGTNLDDGVPSRFSGSGSGTDYTLTISSLQPEDFATYYCVQYAQFPWTFGGGTKLEIK

SEQ ID NO: 1178 - protein, 6 aa, Artificial Sequence
  Description of Artificial Sequence: Synthetic peptide
QDINSN

SEQ ID NO: 1179 - protein, 3 aa, Artificial Sequence
  Description of Artificial Sequence: Synthetic peptide
HGT

SEQ ID NO: 1180 - protein, 9 aa, Artificial Sequence
  Description of Artificial Sequence: Synthetic peptide
VQYAQFPWT

SEQ ID NO: 1181 - protein, 116 aa, Artificial Sequence
  Description of Artificial Sequence: Synthetic polypeptide
QVQLQESGPGLVKPSQTLSLTCTVSGYSISSDFAWNWIRQPPGKGLEWMGYISYSGNTRYQPSLKSRITISRDTSKNQFFLKLNSVTAADTATYYCVTAGRGFPYWGQGTLVTVSS

SEQ ID NO: 1182 - protein, 9 aa, Artificial Sequence
  Description of Artificial Sequence: Synthetic peptide
GYSISSDFA

SEQ ID NO: 1183 - protein, 7 aa, Artificial Sequence
  Description of Artificial Sequence: Synthetic peptide
ISYSGNT

SEQ ID NO: 1184 - protein, 9 aa, Artificial Sequence
  Description of Artificial Sequence: Synthetic peptide
VTAGRGFPY

SEQ ID NO: 1185 - protein, 113 aa, Artificial Sequence
  Description of Artificial Sequence: Synthetic polypeptide
ELVMTQSPSSLTVTAGEKVTMSCKSSQSLLNSGNQKNYLTWYQQKPGQPPKLLIYWASTRESGVPDRFTGSGSGTDFTLTISSVQAEDLAVYYCQNDYSYPLTFGAGTKLEIK

SEQ ID NO: 1186 - protein, 12 aa, Artificial Sequence
  Description of Artificial Sequence: Synthetic peptide
QSLLNSGNQKNY

SEQ ID NO: 1187 - protein, 3 aa, Artificial Sequence
  Description of Artificial Sequence: Synthetic peptide
WAS

SEQ ID NO: 1188 - protein, 9 aa, Artificial Sequence
  Description of Artificial Sequence: Synthetic peptide
QNDYSYPLT

SEQ ID NO: 1189 - protein, 121 aa, Artificial Sequence
  Description of Artificial Sequence: Synthetic polypeptide
EVQLLEQSGAELVRPGTSVKISCKASGYAFTNYWLGWVKQRPGHGLEWIGDIHFPGSGNIHYNEKFKGKATLTADKSSSTAYMQLSSLTFEDSAVYFCARLRNWDEPMDYWGQGTTVTVSS

SEQ ID NO: 1190 - protein, 8 aa, Artificial Sequence
  Description of Artificial Sequence: Synthetic peptide
ASGYAFTN

SEQ ID NO: 1191 - protein, 9 aa, Artificial Sequence
  Description of Artificial Sequence: Synthetic peptide
GDIHFPGSG

SEQ ID NO: 1192 - protein, 14 aa, Artificial Sequence
  Description of Artificial Sequence: Synthetic peptide
FCARLRNWDEPMDY

SEQ ID NO: 1193 - protein, 107 aa, Artificial Sequence
  Description of Artificial Sequence: Synthetic polypeptide
ELQMTQSPSSLSASVGDRVTITCRTSQSISSYLNWYQQKPGQPPKLLIYWASTRESGVPDRFSGSGSGTDFTLTISSLQPEDSATYYCQQSYDIPYTFGQGTKLEIK

SEQ ID NO: 1194 - protein, 6 aa, Artificial Sequence
  Description of Artificial Sequence: Synthetic peptide
QSISSY

SEQ ID NO: 1195 - protein, 3 aa, Artificial Sequence
  Description of Artificial Sequence: Synthetic peptide
WAS

SEQ ID NO: 1196 - protein, 9 aa, Artificial Sequence
  Description of Artificial Sequence: Synthetic peptide
QQSYDIPYT

SEQ ID NO: 1197 - protein, 127 aa, Artificial Sequence
  Description of Artificial Sequence: Synthetic polypeptide
EVQLLESGGGVVQPGRSLRLSCAASGFTFSSYGMHWVRQAPGKGLEWVAVISYDGSNKYYADSVKGRFTISRDNSKNTLYLQMNSLRAEDTAVYYCAKDMGWGSGWRPYYYYGMDVWGQGTTVTVSS

SEQ ID NO: 1198 - protein, 8 aa, Artificial Sequence
  Description of Artificial Sequence: Synthetic peptide
GFTFSSYG

SEQ ID NO: 1199 - protein, 8 aa, Artificial Sequence
  Description of Artificial Sequence: Synthetic peptide
ISYDGSNK

SEQ ID NO: 1200 - protein, 20 aa, Artificial Sequence
  Description of Artificial Sequence: Synthetic peptide
AKDMGWGSGWRPYYYYGMDV

SEQ ID NO: 1201 - protein, 112 aa, Artificial Sequence
  Description of Artificial Sequence: Synthetic polypeptide
DIVLTQSPFSNPVTLGTSASISCRSTKSLLHSNGITYLYWYLQKPGQSPQLLIYQMSNLASGVPDRFSSSGSGTDFTLRISRVEAEDVGVYYCAQNLEIPRTFGGGTKLEIK

SEQ ID NO: 1202 - protein, 11 aa, Artificial Sequence
  Description of Artificial Sequence: Synthetic peptide
KSLLHSNGITY

SEQ ID NO: 1203 - protein, 3 aa, Artificial Sequence
  Description of Artificial Sequence: Synthetic peptide
QMS

SEQ ID NO: 1204 - protein, 9 aa, Artificial Sequence
  Description of Artificial Sequence: Synthetic peptide
AQNLEIPRT

SEQ ID NO: 1205 - protein, 116 aa, Artificial Sequence
  Description of Artificial Sequence: Synthetic polypeptide
QVKLQQSGPELKKPGETVKISCKASGYTFTNYGMNWVKQAPGKGLKWMGWINTYTGESTYADDFKGRFAFSLETSASAAYLQINNLKNEDTATYFCARFAIKGDYWGQGTTVTVSS

SEQ ID NO: 1206 - protein, 8 aa, Artificial Sequence
  Description of Artificial Sequence: Synthetic peptide
GYTFTNYG

SEQ ID NO: 1207 - protein, 8 aa, Artificial Sequence
  Description of Artificial Sequence: Synthetic peptide
INTYTGES

SEQ ID NO: 1208 - protein, 9 aa, Artificial Sequence
  Description of Artificial Sequence: Synthetic peptide
ARFAIKGDY

SEQ ID NO: 1209 - protein, 107 aa, Artificial Sequence
  Description of Artificial Sequence: Synthetic polypeptide
NIVMTQSPKSMSMSVGERVTLTCKASENVVTYVSWYQQKPEQSPKLLIYGASNRYTGVPDRFTGSGSATDFTLTISSVQAEDLADYHCGQGYSYPYTFGGGTKLEIK

SEQ ID NO: 1210 - protein, 6 aa, Artificial Sequence
  Description of Artificial Sequence: Synthetic peptide
ENVVTY

SEQ ID NO: 1211 - protein, 3 aa, Artificial Sequence
  Description of Artificial Sequence: Synthetic peptide
GAS

SEQ ID NO: 1212 - protein, 9 aa, Artificial Sequence
  Description of Artificial Sequence: Synthetic peptide
GQGYSYPYT

SEQ ID NO: 1213 - protein, 116 aa, Artificial Sequence
  Description of Artificial Sequence: Synthetic polypeptide
QVQLQQSGAELVRPGTSVKVSCKASGYAFTNYLIEWVKQRPGQGLEWIGVINPGSGGTNYNEKFKGKATLTADKSSSTAYMQLSSLTSDDSAVYFCARDGPWFAYWGQGTLVTVSA

SEQ ID NO: 1214 - protein, 8 aa, Artificial Sequence
  Description of Artificial Sequence: Synthetic peptide
GYAFTNYL

SEQ ID NO: 1215 - protein, 8 aa, Artificial Sequence
  Description of Artificial Sequence: Synthetic peptide
INPGSGGT

SEQ ID NO: 1216 - protein, 9 aa, Artificial Sequence
  Description of Artificial Sequence: Synthetic peptide
ARDGPWFAY

SEQ ID NO: 1217 - protein, 109 aa, Artificial Sequence
  Description of Artificial Sequence: Synthetic polypeptide
EIVMTQSPATLSVSPGERATLSCRASQSVSSNLAWYQQKPGQAPRLITYGASTTASGIPARFSASGSGTDFTLTISSLQSEDFAVYYCQQYNNWPPAYTFGQGTKLEIK

SEQ ID NO: 1218 - protein, 6 aa, Artificial Sequence
  Description of Artificial Sequence: Synthetic peptide
QSVSSN

SEQ ID NO: 1219 - protein, 3 aa, Artificial Sequence
  Description of Artificial Sequence: Synthetic peptide
GAS

SEQ ID NO: 1220 - protein, 11 aa, Artificial Sequence
  Description of Artificial Sequence: Synthetic peptide
QQYNNWPPAYT

SEQ ID NO: 1221 - protein, 116 aa, Artificial Sequence
  Description of Artificial Sequence: Synthetic polypeptide
QVQLVQSGAEVKKPGSSVKVSCICASGGTFSSYAISWVRQAPGQGLEWMGGIIPIFGTANYAQKFQGRVTITADESTSTAYMELSSLRSEDTAVYYCARGLLWNYWGQGTLVTVSS

SEQ ID NO: 1222 - protein, 8 aa, Artificial Sequence
  Description of Artificial Sequence: Synthetic peptide
SGGTFSSY

SEQ ID NO: 1223 - protein, 8 aa, Artificial Sequence
  Description of Artificial Sequence: Synthetic peptide
GIIPIFGT

SEQ ID NO: 1224 - protein, 9 aa, Artificial Sequence
  Description of Artificial Sequence: Synthetic peptide
CARGLLWNY

SEQ ID NO: 1225 - protein, 107 aa, Artificial Sequence
  Description of Artificial Sequence: Synthetic polypeptide
DIQMTQSPSFLSASVGDRVTITCRASQGIISYLAWYQQKPEKAPKRLIYAASSLQSGVPSRFSGSGSGTEFTLTISSLQPEDFATYYCGQYANYPYTFGQGTKLEIK

SEQ ID NO: 1226 - protein, 6 aa, Artificial Sequence
  Description of Artificial Sequence: Synthetic peptide
QGIISY

SEQ ID NO: 1227 - protein, 3 aa, Artificial Sequence
  Description of Artificial Sequence: Synthetic peptide
AAS

SEQ ID NO: 1228 - protein, 9 aa, Artificial Sequence
  Description of Artificial Sequence: Synthetic peptide
GQYANYPYT

SEQ ID NO: 1229 - protein, 118 aa, Artificial Sequence
  Description of Artificial Sequence: Synthetic polypeptide
QVQLVQSGAEVKKPGASVKVSCKASGYTFTGYWMNWVRQAPGQGLEWMGDIYPGSGNTNYDEKFQGRVTMTRDTSISTAYMELSRLRSDDTAVYYCARGGYYEDFDSWGQGTTVTVSS

SEQ ID NO: 1230 - protein, 8 aa, Artificial Sequence
  Description of Artificial Sequence: Synthetic peptide
GYTFTGYW

SEQ ID NO: 1231 - protein, 8 aa, Artificial Sequence
  Description of Artificial Sequence: Synthetic peptide
IYPGSGNT

SEQ ID NO: 1232 - protein, 11 aa, Artificial Sequence
  Description of Artificial Sequence: Synthetic peptide
ARGGYYEDFDS

SEQ ID NO: 1233 - protein, 111 aa, Artificial Sequence
  Description of Artificial Sequence: Synthetic polypeptide
DIQLTQTPLSLPVSLGDQASISCRSSQSLVHSNGNTYLHWYLQKPGQSPKLLIYKVSNRFSGVPDRFSGSGSGTDFTLKISSVEAEDLGVYFCSQSTHVPTFGGGTKLEIK

SEQ ID NO: 1234 - protein, 11 aa, Artificial Sequence
  Description of Artificial Sequence: Synthetic peptide
QSLVHSNGNTY

SEQ ID NO: 1235 - protein, 3 aa, Artificial Sequence
  Description of Artificial Sequence: Synthetic peptide
KVS

SEQ ID NO: 1236 - protein, 8 aa, Artificial Sequence
  Description of Artificial Sequence: Synthetic peptide
SQSTHVPT

SEQ ID NO: 1237 - protein, 118 aa, Artificial Sequence
  Description of Artificial Sequence: Synthetic polypeptide
QVQLQQSGGGLVQPGGSMKIFCAASGFTFSDAWMDWVRQSPEKGLEWVAEIRNKANNHETYYAESVKGRFTITRDDSKSRMSLQMNSLRAEDTGIYYCSGGKVRNAYWGQGTTVTVSS

SEQ ID NO: 1238 - protein, 8 aa, Artificial Sequence
  Description of Artificial Sequence: Synthetic peptide
GFTFSDAW

SEQ ID NO: 1239 - protein, 10 aa, Artificial Sequence
  Description of Artificial Sequence: Synthetic peptide
IRNKANNHET

SEQ ID NO: 1240 - protein, 9 aa, Artificial Sequence
  Description of Artificial Sequence: Synthetic peptide
SGGKVRNAY

SEQ ID NO: 1241 - protein, 108 aa, Artificial Sequence
  Description of Artificial Sequence: Synthetic polypeptide
EIVLTQSPGTLSLSPGERATLSCRASQSVSSSYLAWYQQKPGQAPRLLIYGASSRATGIPDRFSGSGSGTDFTLTISRLEPEDFAVYYCQQYGSSPLTFGGGTKVEIK

SEQ ID NO: 1242 - protein, 7 aa, Artificial Sequence
  Description of Artificial Sequence: Synthetic peptide
QSVSSSY

SEQ ID NO: 1243 - protein, 3 aa, Artificial Sequence
  Description of Artificial Sequence: Synthetic peptide
GAS

SEQ ID NO: 1244 - protein, 9 aa, Artificial Sequence
  Description of Artificial Sequence: Synthetic peptide
QQYGSSPLT

SEQ ID NO: 1245 - protein, 126 aa, Artificial Sequence
  Description of Artificial Sequence: Synthetic polypeptide
QAQVVESGGGVVQSGRSLRLSCAASGFAFSSYGMHWVRQAPGKGLEWVAVIWYDGSNKYYADSVRGRFTISRDNSENTLYLQMNSLRAEDTAVYYCARDHYGSGVHHYFYYGLDVWGQGTTVTVSS

SEQ ID NO: 1246 - protein, 8 aa, Artificial Sequence
  Description of Artificial Sequence: Synthetic peptide
GFAFSSYG

SEQ ID NO: 1247 - protein, 8 aa, Artificial Sequence
  Description of Artificial Sequence: Synthetic peptide
IWYDGSNK

SEQ ID NO: 1248 - protein, 19 aa, Artificial Sequence
  Description of Artificial Sequence: Synthetic peptide
ARDHYGSGVHHYFYYGLDV

SEQ ID NO: 1249 - protein, 110 aa, Artificial Sequence
  Description of Artificial Sequence: Synthetic polypeptide
DIQLTQSPSSLSASVGDRVTITCSVSSSISSNNLHWYQQKPGKAPKPWIYGTSNLASGVPSRFSGSGSGTDYTFTISSLQPEDIATYYCQQWSSYPYMYTFGQGTKVEIK

SEQ ID NO: 1250 - protein, 7 aa, Artificial Sequence
  Description of Artificial Sequence: Synthetic peptide
SSISSNN

SEQ ID NO: 1251 - protein, 3 aa, Artificial Sequence
  Description of Artificial Sequence: Synthetic peptide
GTS

SEQ ID NO: 1252 - protein, 11 aa, Artificial Sequence
  Description of Artificial Sequence: Synthetic peptide
QQWSSYPYMYT

SEQ ID NO: 1253 - protein, 119 aa, Artificial Sequence
  Description of Artificial Sequence: Synthetic polypeptide
EVQLVESGGGVVQPGRSLRLSCSASGFTFSGYGLSWVRQAPGKGLEWVAMISSGGSYTYYADSVKGRFAISRDNAKNTLFLQMDSLRPEDTGVYFCARHGDDPAWFAYWGQGTPVTVSS

SEQ ID NO: 1254 - protein, 8 aa, Artificial Sequence
  Description of Artificial Sequence: Synthetic peptide
GFTFSGYG

SEQ ID NO: 1255 - protein, 8 aa, Artificial Sequence
  Description of Artificial Sequence: Synthetic peptide
ISSGGSYT

SEQ ID NO: 1256 - protein, 13 aa, Artificial Sequence
  Description of Artificial Sequence: Synthetic peptide
ARHGDDPAWFAYW

SEQ ID NO: 1257 - protein, 111 aa, Artificial Sequence
  Description of Artificial Sequence: Synthetic polypeptide
DIVLTQSPLSLAVSLGQPAIISCKASQSVSFAGTSLMHWYHQKPGQQPRLLIYRASNLEAGVPDRFSGSGSKTDFTLTISPVEAEDAATYYCQQSREYPYTFGGGTKLEIK

SEQ ID NO: 1258 - protein, 10 aa, Artificial Sequence
  Description of Artificial Sequence: Synthetic peptide
QSVSFAGTSL

SEQ ID NO: 1259 - protein, 3 aa, Artificial Sequence
  Description of Artificial Sequence: Synthetic peptide
RAS

SEQ ID NO: 1260 - protein, 9 aa, Artificial Sequence
  Description of Artificial Sequence: Synthetic peptide
QQSREYPYT

SEQ ID NO: 1261 - protein, 118 aa, Artificial Sequence
  Description of Artificial Sequence: Synthetic polypeptide
QVQLVQSGAEVVKPGASVKISCKASGYTFTGYFMNWVKQSPGQSLEWIGRIHPYDGDTFYNQKFQGKATLTVDKSSNTAHMELLSLTSEDFAVYYCTRYDGSRAMDYWGQGTTVTVSS

SEQ ID NO: 1262 - protein, 8 aa, Artificial Sequence
  Description of Artificial Sequence: Synthetic peptide
GYTFTGYF

SEQ ID NO: 1263 - protein, 8 aa, Artificial Sequence
  Description of Artificial Sequence: Synthetic peptide
IHPYDGDT

SEQ ID NO: 1264 - protein, 11 aa, Artificial Sequence
  Description of Artificial Sequence: Synthetic peptide
TRYDGSRAMDY

SEQ ID NO: 1265 - protein, 108 aa, Artificial Sequence
  Description of Artificial Sequence: Synthetic polypeptide
DIELTQPPSVSVAPGQTARISCSGDNIGSFYVHWYQQKPGQAPVLVIYDKSNRPSGIPERFSGSNSGNTATLTISGTQAEDEADYYCQSYANTLSLVFGGGTKLTVLG

SEQ ID NO: 1266 - protein, 6 aa, Artificial Sequence
  Description of Artificial Sequence: Synthetic peptide
NIGSFY

SEQ ID NO: 1267 - protein, 3 aa, Artificial Sequence
  Description of Artificial Sequence: Synthetic peptide
DKS

SEQ ID NO: 1268 - protein, 10 aa, Artificial Sequence
  Description of Artificial Sequence: Synthetic peptide
QSYANTLSLV

SEQ ID NO: 1269 - protein, 118 aa, Artificial Sequence
  Description of Artificial Sequence: Synthetic polypeptide
EVQLVESGGGLVQPGGSLRLSCAASGFTFSHYTLSWVRQAPGKGLEWVSVISGDGSYTYYADSVKGRFTISSDNSKNTLYLQMNSLRAEDTAVYYCARNFIKYVFANWGQGTLVTVSS

SEQ ID NO: 1270 - protein, 8 aa, Artificial Sequence
  Description of Artificial Sequence: Synthetic peptide
GFTFSHYT

SEQ ID NO: 1271 - protein, 8 aa, Artificial Sequence
  Description of Artificial Sequence: Synthetic peptide
ISGDGSYT

SEQ ID NO: 1272 - protein, 11 aa, Artificial Sequence
  Description of Artificial Sequence: Synthetic peptide
ARNFIKYVFAN

SEQ ID NO: 1273 - protein, 112 aa, Artificial Sequence
  Description of Artificial Sequence: Synthetic polypeptide
DVLMTQIPVSLPVSLGDQASISCRSSQIIVHNNGNTYLEWYLQKPGQSPQLLIYKVSNRFSGVPDRFSGSGSGTDFTLKISRVEAEDLGVYYCFQGSHVPFTFGSGTKLEIK

SEQ ID NO: 1274 - protein, 11 aa, Artificial Sequence
  Description of Artificial Sequence: Synthetic peptide
QIIVHNNGNTY

SEQ ID NO: 1275 - protein, 3 aa, Artificial Sequence
  Description of Artificial Sequence: Synthetic peptide
KVS

SEQ ID NO: 1276 - protein, 9 aa, Artificial Sequence
  Description of Artificial Sequence: Synthetic peptide
FQGSHVPFT

SEQ ID NO: 1277 - protein, 119 aa, Artificial Sequence
  Description of Artificial Sequence: Synthetic polypeptide
EVNLVESGGGLVQPGGSLKVSCVTSGFTFSDYYMYWVRQTPEKRLEWVAYISQGGDITDYPDTVKGRFTISRDNAKNSLYLQMSRLKSEDTAMYYCARGLDDGAWFAYWGQGTLVTVSV

SEQ ID NO: 1278 - protein, 8 aa, Artificial Sequence
  Description of Artificial Sequence: Synthetic peptide
GFTFSDYY

SEQ ID NO: 1279 - protein, 8 aa, Artificial Sequence
  Description of Artificial Sequence: Synthetic peptide
ISQGGDIT

SEQ ID NO: 1280 - protein, 12 aa, Artificial Sequence
  Description of Artificial Sequence: Synthetic peptide
ARGLDDGAWFAY

SEQ ID NO: 1281 - protein, 112 aa, Artificial Sequence
  Description of Artificial Sequence: Synthetic polypeptide
DIQMTQSPSSLSASVGDRVTITCRSSQRIVHSNGNTYLEWYQQTPGKAPKLLIYKVSNRFSGVPSRFSGSGSGTDFTFTISSLQPEDIATYYCFQGSHVPFTFGQGTKLQIT

SEQ ID NO: 1282 - protein, 11 aa, Artificial Sequence
  Description of Artificial Sequence: Synthetic peptide
QRIVHSNGNTY

SEQ ID NO: 1283 - protein, 3 aa, Artificial Sequence
  Description of Artificial Sequence: Synthetic peptide
KVS

SEQ ID NO: 1284 - protein, 9 aa, Artificial Sequence
  Description of Artificial Sequence: Synthetic peptide
FQGSHVPFT

SEQ ID NO: 1285 - protein, 119 aa, Artificial Sequence
  Description of Artificial Sequence: Synthetic polypeptide
EVQLVESGGGVVQPGRSLRLSCSTSGFTFSDYYMYWVRQAPGKGLEWVAYMSNVGAITDYPDTVKGRFTISRDNSKNTLFLQMDSLRPEDTGVYFCARGTRDGSWFAYWGQGTPVTVSS

SEQ ID NO: 1286 - protein, 8 aa, Artificial Sequence
  Description of Artificial Sequence: Synthetic peptide
GFTFSDYY

SEQ ID NO: 1287 - protein, 8 aa, Artificial Sequence
  Description of Artificial Sequence: Synthetic peptide
MSNVGAIT

SEQ ID NO: 1288 - protein, 12 aa, Artificial Sequence
  Description of Artificial Sequence: Synthetic peptide
ARGTRDGSWFAY

SEQ ID NO: 1289 - protein, 112 aa, Artificial Sequence
  Description of Artificial Sequence: Synthetic polypeptide
DIVMTQAAFSNPVTLGTSASISCRSSKSLLYSNGITYLYWYLQKPGQSPQLLIYQMSNLASGVPDRFSSSGSGTDFTLRISRVEAEDVGVYYCAQNLEVPWTFGGGTKLEIK

SEQ ID NO: 1290 - protein, 11 aa, Artificial Sequence
  Description of Artificial Sequence: Synthetic peptide
KSLLYSNGITY

SEQ ID NO: 1291 - protein, 3 aa, Artificial Sequence
  Description of Artificial Sequence: Synthetic peptide
QMS

SEQ ID NO: 1292 - protein, 9 aa, Artificial Sequence
  Description of Artificial Sequence: Synthetic peptide
AQNLEVPWT

SEQ ID NO: 1293 - protein, 117 aa, Artificial Sequence
  Description of Artificial Sequence: Synthetic polypeptide
EVKLLESGGGLVQPGGSQKLSCAASGFDFSGYWMSWVRQAPGKGLEWIGEINPDSSTINYTPSLKDKFIISRDNAKNTLYLQMSKVRSEDTALYYCARETGTRFDYWGQGTTLTVSS

SEQ ID NO: 1294 - protein, 8 aa, Artificial Sequence
  Description of Artificial Sequence: Synthetic peptide
SGFDFSGY

SEQ ID NO: 1295 - protein, 8 aa, Artificial Sequence
  Description of Artificial Sequence: Synthetic peptide
EINPDSST

SEQ ID NO: 1296 - protein, 11 aa, Artificial Sequence
  Description of Artificial Sequence: Synthetic peptide
CARETGTRFDY

SEQ ID NO: 1297 - protein, 107 aa, Artificial Sequence
  Description of Artificial Sequence: Synthetic polypeptide
DIQMTQSPSSLSASVGDRVTITCRASQGIRNDLGWYQQKPGKAPKRLIYAASSLQSGVPSRFSGSGSGTEFILTVSSLQPEDFATYYCLQYNSNPFTFGPGTKVDIK

SEQ ID NO: 1298 - protein, 6 aa, Artificial Sequence
  Description of Artificial Sequence: Synthetic peptide
QGIRND

SEQ ID NO: 1299 - protein, 3 aa, Artificial Sequence
  Description of Artificial Sequence: Synthetic peptide
AAS

SEQ ID NO: 1300 - protein, 9 aa, Artificial Sequence
  Description of Artificial Sequence: Synthetic peptide
LQYNSNPFT

SEQ ID NO: 1301 - protein, 128 aa, Artificial Sequence
  Description of Artificial Sequence: Synthetic polypeptide
EVQLVESGGGLVQPGGSLRLSCAASGFTFSNYLMNWVRQAPGKGLEWLANIQEDGIEKYYVDSVKGRFTISRDNAKNSLYLQMNSLRAEDTAVYYCAREPSHYDILTGYDYYYGMDVWGQGTTVTVSS

SEQ ID NO: 1302 - protein, 8 aa, Artificial Sequence
  Description of Artificial Sequence: Synthetic peptide
GFTFSNYL

SEQ ID NO: 1303 - protein, 8 aa, Artificial Sequence
  Description of Artificial Sequence: Synthetic peptide
IQEDGIEK

SEQ ID NO: 1304 - protein, 21 aa, Artificial Sequence
  Description of Artificial Sequence: Synthetic peptide
AREPSHYDILTGYDYYYGMDV

SEQ ID NO: 1305 - protein, 113 aa, Artificial Sequence [sequence omitted]

SEQ ID NO: 1306 - protein, 11 aa, Artificial Sequence
  Description of Artificial Sequence: Synthetic peptide
QSLVHRNGNTY

SEQ ID NO: 1307 - protein, 3 aa, Artificial Sequence
  Description of Artificial Sequence: Synthetic peptide
KVS

SEQ ID NO: 1308 - protein, 10 aa, Artificial Sequence
  Description of Artificial Sequence: Synthetic peptide
SQSTHVPPLT

SEQ ID NO: 1309 - protein, 113 aa, Artificial Sequence [sequence omitted]

SEQ ID NO: 1310 - protein, 8 aa, Artificial Sequence
  Description of Artificial Sequence: Synthetic peptide
GSSFTGYN

SEQ ID NO: 1311 - protein, 8 aa, Artificial Sequence
  Description of Artificial Sequence: Synthetic peptide
IDPYYGGT

SEQ ID NO: 1312 - protein, 6 aa, Artificial Sequence
  Description of Artificial Sequence: Synthetic peptide
VSGMEY

SEQ ID NO: 1313 - protein, 104 aa, Artificial Sequence
  Description of Artificial Sequence: Synthetic polypeptide
SIVMTQTPKFLLVSAGDRVTITCKASQSVSNDVTWYQQKAGQSPKLLIYSASNRYSGVPDRFTGSGYGTAFTFTISTVQAEDLAVYFCQQDYSSFGGGTKLEIK

SEQ ID NO: 1314 - protein, 6 aa, Artificial Sequence
  Description of Artificial Sequence: Synthetic peptide
QSVSND

SEQ ID NO: 1315 - protein, 3 aa, Artificial Sequence
  Description of Artificial Sequence: Synthetic peptide
SAS

SEQ ID NO: 1316 - protein, 6 aa, Artificial Sequence
  Description of Artificial Sequence: Synthetic peptide
QQDYSS

SEQ ID NO: 1317 - protein, 119 aa, Artificial Sequence
  Description of Artificial Sequence: Synthetic polypeptide
QVQLKESGPGLVAPSQSLSITCTVSGFSVTNYGVHWVRQPPGKGLEWLGVIWAGGITNYNSAFMSRLSISKDNSKSQVFLKMNSLQIDDTAMYYCASRGGHYGYALDYWGQGTSVTVSS

SEQ ID NO: 1318 - protein, 8 aa, Artificial Sequence
  Description of Artificial Sequence: Synthetic peptide
GFSVTNYG

SEQ ID NO: 1319 - protein, 7 aa, Artificial Sequence
  Description of Artificial Sequence: Synthetic peptide
IWAGGIT

SEQ ID NO: 1320 - protein, 13 aa, Artificial Sequence
  Description of Artificial Sequence: Synthetic peptide
ASRGGHYGYALDY

SEQ ID NO: 1321 - protein, 104 aa, Artificial Sequence
  Description of Artificial Sequence: Synthetic polypeptide
EIVMTQTPATLSVSAGERVTITCKASQSVSNDVTWYQQKPGQAPRLLIYSASNRYSGVPARFSGSGYGTEFTFTISSVQSEDFAVYFCQQDYSSFGQGTKLEIK

SEQ ID NO: 1322 - protein, 6 aa, Artificial Sequence
  Description of Artificial Sequence: Synthetic peptide
QSVSND

SEQ ID NO: 1323 - protein, 3 aa, Artificial Sequence
  Description of Artificial Sequence: Synthetic peptide
SAS

SEQ ID NO: 1324 - protein, 6 aa, Artificial Sequence
  Description of Artificial Sequence: Synthetic peptide
QQDYSS

SEQ ID NO: 1325 - protein, 119 aa, Artificial Sequence
  Description of Artificial Sequence: Synthetic polypeptide
QVQLVESGPGVVQPGRSLRISCAVSGFSVTNYGVHWVRQPPGKGLEWLGVIWAGGITNYNSAFMSRLTISKDNSKNTVYLQMNSLRAEDTAMYYCASRGGHYGYALDYWGQGTLVTVSS

SEQ ID NO: 1326 - protein, 8 aa, Artificial Sequence
  Description of Artificial Sequence: Synthetic peptide
GFSVTNYG

SEQ ID NO: 1327 - protein, 7 aa, Artificial Sequence
  Description of Artificial Sequence: Synthetic peptide
IWAGGIT

SEQ ID NO: 1328 - protein, 13 aa, Artificial Sequence
  Description of Artificial Sequence: Synthetic peptide
ASRGGHYGYALDY

SEQ ID NO: 1329 - protein, 112 aa, Artificial Sequence
  Description of Artificial Sequence: Synthetic polypeptide
DVVMTQTPLSLPVSLGDQASISCRSSQSLLKNNGNTFLHWYLQKSGQSPKLLIYKVSNRLSGVPDRFSGSGSGTYFTLKISRVEAEDLGVYFCSQSTHIPYTFGGGTKLELK

SEQ ID NO: 1330 - protein, 11 aa, Artificial Sequence
  Description of Artificial Sequence: Synthetic peptide
QSLLKNNGNTF

SEQ ID NO: 1331 - protein, 3 aa, Artificial Sequence
  Description of Artificial Sequence: Synthetic peptide
KVS

SEQ ID NO: 1332 - protein, 9 aa, Artificial Sequence
  Description of Artificial Sequence: Synthetic peptide
SQSTHIPYT

SEQ ID NO: 1333 - protein, 119 aa, Artificial Sequence
  Description of Artificial Sequence: Synthetic polypeptide
EVKLVESGGGLVLPGDSLRLSCATSKFTFTDYYMTWVRQPPRKALEQLGFIRNRANGYTTEYNPSVKGRFTISRDNSQSILYLQMNTLRTEDSATYYCARVSNWAFDYWGQGTTLTVSS

SEQ ID NO: 1334 - protein, 8 aa, Artificial Sequence
  Description of Artificial Sequence: Synthetic peptide
KFTFTDYY

SEQ ID NO: 1335 - protein, 10 aa, Artificial Sequence
  Description of Artificial Sequence: Synthetic peptide
IRNRANGYTT

SEQ ID NO: 1336 - protein, 10 aa, Artificial Sequence
  Description of Artificial Sequence: Synthetic peptide
ARVSNWAFDY

SEQ ID NO: 1337 - protein, 107 aa, Artificial Sequence
  Description of Artificial Sequence: Synthetic polypeptide
DIQMTQITSSLSVSLGDRVIISCRASQDIGNFLNWYQQKPDGSLKLLIYYTSRLQSGVPSRFSGWGSGTDYSLTISNLEEEDIATFFCQQGKTLPYTFGGGTKLEIK

SEQ ID NO: 1338 - protein, 8 aa, Artificial Sequence
  Description of Artificial Sequence: Synthetic peptide
GFTFSNFG

SEQ ID NO: 1339 - protein, 8 aa, Artificial Sequence
  Description of Artificial Sequence: Synthetic peptide
ISSGGSSI

SEQ ID NO: 1340 - protein, 15 aa, Artificial Sequence
  Description of Artificial Sequence: Synthetic peptide
TRGGTGTRSLYYFDY

SEQ ID NO: 1341 - protein, 122 aa, Artificial Sequence
  Description of Artificial Sequence: Synthetic polypeptide
DVQLVESGGGLVQPGGSRKLSCAASGFTFSNFGMHWVRQAPEKGLEWVAYISSGGSSINYADTVKGRFTISRDNPKNTLFLQMTSLRSEDTAIYYCTRGGTGTRSLYYFDYWGQGATLIVSS

SEQ ID NO: 1342 - protein, 6 aa, Artificial Sequence
  Description of Artificial Sequence: Synthetic peptide
QDIGNF

SEQ ID NO: 1343 - protein, 3 aa, Artificial Sequence
  Description of Artificial Sequence: Synthetic peptide
YTS

SEQ ID NO: 1344 - protein, 7 aa, Artificial Sequence
  Description of Artificial Sequence: Synthetic peptide
QQGKTLP

SEQ ID NO: 1345 - protein, 107 aa, Artificial Sequence
  Description of Artificial Sequence: Synthetic polypeptide
DIQMTQTASSLPASLGDRVTISCSASQDISNYLNWYQQKPDGTVKLLIFYSSNLHSGVPSRFSGGGSGTDYSLTISNLEPEDIATYFCHQYSKLPWTFGGGTKLEIK

SEQ ID NO: 1346 - protein, 6 aa, Artificial Sequence
  Description of Artificial Sequence: Synthetic peptide
QDISNY

SEQ ID NO: 1347 - protein, 3 aa, Artificial Sequence
  Description of Artificial Sequence: Synthetic peptide
YSS

SEQ ID NO: 1348 - protein, 9 aa, Artificial Sequence
  Description of Artificial Sequence: Synthetic peptide
HQYSKLPWT

SEQ ID NO: 1349 - protein, 119 aa, Artificial Sequence
  Description of Artificial Sequence: Synthetic polypeptide
EVTLVESGGDFVKPGGSLKVSCAASGFAFSHYAMSWVRQTPAKRLEWVAYISSGGSGTYYSDSVKGRFTISRDNAKNTLYLQMRSLRSEDSAMYFCTRVKLGTYYFDSWGQGTTLTVSS

SEQ ID NO: 1350 - protein, 8 aa, Artificial Sequence
  Description of Artificial Sequence: Synthetic peptide
GFAFSHYA

SEQ ID NO: 1351 - protein, 8 aa, Artificial Sequence
  Description of Artificial Sequence: Synthetic peptide
ISSGGSGT

SEQ ID NO: 1352 - protein, 12 aa, Artificial Sequence
  Description of Artificial Sequence: Synthetic peptide
TRVKLGTYYFDS

SEQ ID NO: 1353 - protein, 107 aa, Artificial Sequence
  Description of Artificial Sequence: Synthetic polypeptide
DIQMTQSPSSLSASVGDRVTITCRASQGISSWLAWYQQKPEKAPKSLIYAASSLQSGVPSRFSGSGSGTDFTLTISSLQPEDFATYYCQQYNSYPPTFGGGTKVEIK

SEQ ID NO: 1354 - protein, 6 aa, Artificial Sequence
  Description of Artificial Sequence: Synthetic peptide
QGISSW

SEQ ID NO: 1355 - protein, 3 aa, Artificial Sequence
  Description of Artificial Sequence: Synthetic peptide
AAS

SEQ ID NO: 1356 - protein, 9 aa, Artificial Sequence
  Description of Artificial Sequence: Synthetic peptide
QQYNSYPPT

SEQ ID NO: 1357 - protein, 122 aa, Artificial Sequence
  Description of Artificial Sequence: Synthetic polypeptide
EVQLVESGGGLVQPGESLRLSCVASGFTFSRYKMNWVRQAPGKGLEWVSYISRSGRDIYYADSVKGRFTISRDNAKNSLYLQMNSLRDEDTAVYYCAGTVTTYYYYFGMDVWGHGTTVTVSS

SEQ ID NO: 1358 - protein, 8 aa, Artificial Sequence
  Description of Artificial Sequence: Synthetic peptide
GFTFSRYK

SEQ ID NO: 1359 - protein, 8 aa, Artificial Sequence
  Description of Artificial Sequence: Synthetic peptide
ISRSGRDI

SEQ ID NO: 1360 - protein, 15 aa, Artificial Sequence
  Description of Artificial Sequence: Synthetic peptide
AGTVTTYYYYFGMDV

SEQ ID NO: 1361 - protein, 106 aa, Artificial Sequence
  Description of Artificial Sequence: Synthetic polypeptide
DIQMTQSPSSLSASVGDRVTITCRASQGISWLAWYQQKPEKAPKSLIYAASSLQSGVPSRFSGSGSGTDFTLTISSLQPEDFATYYCQQYNSYPPTFGGGTKVEIK

SEQ ID NO: 1362 - protein, 5 aa, Artificial Sequence
  Description of Artificial Sequence: Synthetic peptide
QGISW

SEQ ID NO: 1363 - protein, 3 aa, Artificial Sequence
  Description of Artificial Sequence: Synthetic peptide
AAS

SEQ ID NO: 1364 - protein, 9 aa, Artificial Sequence
  Description of Artificial Sequence: Synthetic peptide
QQYNSYPPT

SEQ ID NO: 1365 - protein, 123 aa, Artificial Sequence
  Description of Artificial Sequence: Synthetic polypeptide
EVQLVESGGGLVQPGESLRLSCVASGFTFSRYKMNWVRQAPGKGLLEWVSYISRSGRDIYYADSVKGRFTISRDNAKNSLYLQMNSLRDEDTAVYYCAGTVTTYYYYFGMDVWGHGTTVTVSS

SEQ ID NO: 1366 - protein, 8 aa, Artificial Sequence
  Description of Artificial Sequence: Synthetic peptide
GFTFSRYK

SEQ ID NO: 1367 - protein, 8 aa, Artificial Sequence
  Description of Artificial Sequence: Synthetic peptide
YISRSGRD

SEQ ID NO: 1368 - protein, 16 aa, Artificial Sequence
  Description of Artificial Sequence: Synthetic peptide
CAGTVTTYYYYFGMDV

SEQ ID NO: 1369 - protein, 106 aa, Artificial Sequence
  Description of Artificial Sequence: Synthetic polypeptide
DIQMTQSPSSLASVGDRVTITCRASQGISSWLAWYQQKPEKAPKSLIYAASSLQSGVPSRFSGSGSGTDFTLTISCLQPEDFATYYCQQYNSYPPTFGGGTKVEIK

SEQ ID NO: 1370 - protein, 6 aa, Artificial Sequence
  Description of Artificial Sequence: Synthetic peptide
QGISSW

SEQ ID NO: 1371 - protein, 3 aa, Artificial Sequence
  Description of Artificial Sequence: Synthetic peptide
AAS

SEQ ID NO: 1372 - protein, 9 aa, Artificial Sequence
  Description of Artificial Sequence: Synthetic peptide
QQYNSYPPT

SEQ ID NO: 1373 - protein, 122 aa, Artificial Sequence
  Description of Artificial Sequence: Synthetic polypeptide
EVQLVESGGGLVQPGESLRLSCVVSGFTFSRYKMNWVRQAPGKGLEWISYISRSGRDIYYADSVKGRFTISRDNAKNSLYLQMSSLRDEDTAVYYCAGTVTTYYYYFGMDVWGLGITVTVSS

SEQ ID NO: 1374 - protein, 8 aa, Artificial Sequence
  Description of Artificial Sequence: Synthetic peptide
GFTFSRYK

SEQ ID NO: 1375 - protein, 8 aa, Artificial Sequence
  Description of Artificial Sequence: Synthetic peptide
ISRSGRDI

SEQ ID NO: 1376 - protein, 17 aa, Artificial Sequence
  Description of Artificial Sequence: Synthetic peptide
AGTVTTYYYYFGMDVWG

SEQ ID NO: 1377 - protein, 106 aa, Artificial Sequence
  Description of Artificial Sequence: Synthetic polypeptide
DIQMTQSPSSLSASVGDRVTITCRASQGISSWLAWYQQKPEKAPKSLIYAASLQSGVPSRFSGSGSGTDFTLTISSLQPEDFATYYCQQYNSYPPTFGGGTKVEIK

SEQ ID NO: 1378 - protein, 6 aa, Artificial Sequence
  Description of Artificial Sequence: Synthetic peptide
QGISSW

SEQ ID NO: 1379 - protein, 2 aa, Artificial Sequence
  Description of Artificial Sequence: Synthetic peptide
AA

SEQ ID NO: 1380 - protein, 9 aa, Artificial Sequence
  Description of Artificial Sequence: Synthetic peptide
QQYNSYPPT

SEQ ID NO: 1381 - protein, 122 aa, Artificial Sequence
  Description of Artificial Sequence: Synthetic polypeptide
EVQLVESGGGSVQPGESLRLSCVASGFTFSRYKMNWVRQAPGKGLEWVSYISRSGRDIYYADSVKGRFTISRDNAKNSLYLQMNSLRDEDTAVYYCAGTVTTYYYDFGMDVWGQGTTVTVSS

SEQ ID NO: 1382 - protein, 8 aa, Artificial Sequence
  Description of Artificial Sequence: Synthetic peptide
GFTFSRYK

SEQ ID NO: 1383 - protein, 8 aa, Artificial Sequence
  Description of Artificial Sequence: Synthetic peptide
ISRSGRDI

SEQ ID NO: 1384 - protein, 15 aa, Artificial Sequence
  Description of Artificial Sequence: Synthetic peptide
AGTVTTYYYDFGMDV

SEQ ID NO: 1385 - protein, 106 aa, Artificial Sequence
  Description of Artificial Sequence: Synthetic polypeptide
QIVLTQSPAIMSASPGEKVTITCSASSSVSYMHWFQQKPGTSPKLWIYSTSNLASGVPARFSGSGSGTSYSLTISRMEAEDAATYYCQQRSSYPYTFGGGTKLEIK

SEQ ID NO: 1386 - protein, 5 aa, Artificial Sequence
  Description of Artificial Sequence: Synthetic peptide
SSVSY

SEQ ID NO: 1387 - protein, 3 aa, Artificial Sequence
  Description of Artificial Sequence: Synthetic peptide
STS

SEQ ID NO: 1388 - protein, 9 aa, Artificial Sequence
  Description of Artificial Sequence: Synthetic peptide
QQRSSYPYT

SEQ ID NO: 1389 - protein, 120 aa, Artificial Sequence
  Description of Artificial Sequence: Synthetic polypeptide
EVQLQQSGPELVKPGASVKISCKASGYTFTDYNMDWVKQSHGKSLEWIGYIYPNNGGTGYNQKFKSKATLTVDKSSSTAYMELHSLTSEDSAVYYCATYGHYYGYMFAYWGQGTLVTVSA

SEQ ID NO: 1390 - protein, 8 aa, Artificial Sequence
  Description of Artificial Sequence: Synthetic peptide
GYTFTDYN

SEQ ID NO: 1391 - protein, 8 aa, Artificial Sequence
  Description of Artificial Sequence: Synthetic peptide
IYPNNGGT

SEQ ID NO: 1392 - protein, 13 aa, Artificial Sequence
  Description of Artificial Sequence: Synthetic peptide
ATYGHYYGYMFAY

SEQ ID NO: 1393 - protein, 107 aa, Artificial Sequence
  Description of Artificial Sequence: Synthetic polypeptide
DIVMTQSQKFMSTSVGDRVSITCKASQNVRTVVAWYQQKPGQSPKTLIYLASNRHTGVPDRFTGSGSGTDFTLTISNVQSEDLADYFCLQHWSYPLTFGSGTKLEVK

SEQ ID NO: 1394 - protein, 6 aa, Artificial Sequence
  Description of Artificial Sequence: Synthetic peptide
QNVRTV

SEQ ID NO: 1395 - protein, 3 aa, Artificial Sequence
  Description of Artificial Sequence: Synthetic peptide
LAS

SEQ ID NO: 1396 - protein, 9 aa, Artificial Sequence
  Description of Artificial Sequence: Synthetic peptide
LQHWSYPLT

SEQ ID NO: 1397 - protein, 117 aa, Artificial Sequence
  Description of Artificial Sequence: Synthetic polypeptide
EVKLVESGGGLVKPGGSLKLSCAASGFAFSTYDMSWVRQTPEKRLEWVATISSGGSYTYYLDSVKGRFTISRDSARNTLYLQMSSLRSEDTALYYCAPTTVVPFAYWGQGTLVTVSA

SEQ ID NO: 1398 - protein, 8 aa, Artificial Sequence
  Description of Artificial Sequence: Synthetic peptide
GFAFSTYD

SEQ ID NO: 1399 - protein, 8 aa, Artificial Sequence
  Description of Artificial Sequence: Synthetic peptide
ISSGGSYT

SEQ ID NO: 1400 - protein, 10 aa, Artificial Sequence
  Description of Artificial Sequence: Synthetic peptide
APTTVVPFAY

SEQ ID NO: 1401 - protein, 108 aa, Artificial Sequence [sequence omitted]

SEQ ID NO: 1402 - protein, 6 aa, Artificial Sequence
  Description of Artificial Sequence: Synthetic peptide
QSVDNN

SEQ ID NO: 1403 - protein, 3 aa, Artificial Sequence
  Description of Artificial Sequence: Synthetic peptide
GAS

SEQ ID NO: 1404 - protein, 10 aa, Artificial Sequence [sequence omitted]

SEQ ID NO: 1405 - protein, 119 aa, Artificial Sequence [sequence omitted]

SEQ ID NO: 1406 - protein, 10 aa, Artificial Sequence
  Description of Artificial Sequence: Synthetic peptide
GGSISSFNYY

SEQ ID NO: 1407 - protein, 7 aa, Artificial Sequence
  Description of Artificial Sequence: Synthetic peptide
IYYSGST

SEQ ID NO: 1408 - protein, 11 aa, Artificial Sequence
  Description of Artificial Sequence: Synthetic peptide
ARGYNWNYFDY

SEQ ID NO: 1409 - protein, 107 aa, Artificial Sequence
  Description of Artificial Sequence: Synthetic polypeptide
EIVMTQSPATLSVSPGERATLSCRASQSVSRNLAWYQQKPGQAPRLLIYGASTRATGIPARFSGSGSGTEFTLTIGSLQSEDFAVYYCQQYKTWPRTFGQGTNVEIK

SEQ ID NO: 1410 - protein, 6 aa, Artificial Sequence
  Description of Artificial Sequence: Synthetic peptide
QSVSRN

SEQ ID NO: 1411 - protein, 3 aa, Artificial Sequence
  Description of Artificial Sequence: Synthetic peptide
GAS

SEQ ID NO: 1412 - protein, 9 aa, Artificial Sequence
  Description of Artificial Sequence: Synthetic peptide
QQYKTWPRT

SEQ ID NO: 1413 - protein, 119 aa, Artificial Sequence
  Description of Artificial Sequence: Synthetic polypeptide
QVQLQQWGAGLLKPSETLSLTCAVFGGSFSGYYWSWIRQPPGKGLEWIGEINHRGNTNDNPSLKSRVTISVDTSKNQFALKLSSVTAADTAVYYCARERGYTYGNFDHWGQGTLVTVSS

SEQ ID NO: 1414 - protein, 8 aa, Artificial Sequence
  Description of Artificial Sequence: Synthetic peptide
GGSFSGYY

SEQ ID NO: 1415 - protein, 7 aa, Artificial Sequence
  Description of Artificial Sequence: Synthetic peptide
INHRGNT

SEQ ID NO: 1416 - protein, 13 aa, Artificial Sequence
  Description of Artificial Sequence: Synthetic peptide
ARERGYTYGNFDH

SEQ ID NO: 1417 - protein, 107 aa, Artificial Sequence
  Description of Artificial Sequence: Synthetic polypeptide
DIQMTQSPSSLSASVGDRVTITCRASQDVNTAVAWYQQKPGKAPKLLIYSASFLYSGVPSRFSGSRSGTDFTLTISSLQPEDFATYYCQQAYTTPPTFGQGTKVEIK

SEQ ID NO: 1418 - protein, 6 aa, Artificial Sequence
  Description of Artificial Sequence: Synthetic peptide
QDVNTA

SEQ ID NO: 1419 - protein, 3 aa, Artificial Sequence
  Description of Artificial Sequence: Synthetic peptide
SAS

SEQ ID NO: 1420 - protein, 9 aa, Artificial Sequence
  Description of Artificial Sequence: Synthetic peptide
QQAYTTPPT

SEQ ID NO: 1421 - protein, 120 aa, Artificial Sequence [sequence omitted]

SEQ ID NO: 1422 - protein, 8 aa, Artificial Sequence
  Description of Artificial Sequence: Synthetic peptide
GFNIKDTY

SEQ ID NO: 1423 - protein, 8 aa, Artificial Sequence
  Description of Artificial Sequence: Synthetic peptide
IYPTNGYT

SEQ ID NO: 1424 - protein, 13 aa, Artificial Sequence
  Description of Artificial Sequence: Synthetic peptide
SRWGGDGFYAMDY

SEQ ID NO: 1425 - protein, 107 aa, Artificial Sequence [sequence omitted]

SEQ ID NO: 1426 - protein, 6 aa, Artificial Sequence
  Description of Artificial Sequence: Synthetic peptide
QDVNTA

SEQ ID NO: 1427 - protein, 3 aa, Artificial Sequence
  Description of Artificial Sequence: Synthetic peptide
SAS

SEQ ID NO: 1428 - protein, 9 aa, Artificial Sequence
  Description of Artificial Sequence: Synthetic peptide
QQHYTTPPT

SEQ ID NO: 1429 - protein, 120 aa, Artificial Sequence [sequence omitted]

SEQ ID NO: 1430 - protein, 8 aa, Artificial Sequence
  Description of Artificial Sequence: Synthetic peptide
GFNIKDTY

SEQ ID NO: 1431 - protein, 8 aa, Artificial Sequence
  Description of Artificial Sequence: Synthetic peptide
IYPTNGYT

SEQ ID NO: 1432 - protein, 13 aa, Artificial Sequence
  Description of Artificial Sequence: Synthetic peptide
SRWGGDGFYAMDY

SEQ ID NO: 1433 - protein, 107 aa, Artificial Sequence [sequence omitted]

SEQ ID NO: 1434 - protein, 6 aa, Artificial Sequence
  Description of Artificial Sequence: Synthetic peptide
QDVSIG

SEQ ID NO: 1435 - protein, 3 aa, Artificial Sequence
  Description of Artificial Sequence: Synthetic peptide
SAS

SEQ ID NO: 1436 - protein, 9 aa, Artificial Sequence
  Description of Artificial Sequence: Synthetic peptide
QQYYIYPYT

SEQ ID NO: 1437 - protein, 119 aa, Artificial Sequence [sequence omitted]

SEQ ID NO: 1438 - protein, 8 aa, Artificial Sequence
  Description of Artificial Sequence: Synthetic peptide
GFTFTDYT

SEQ ID NO: 1439 - protein, 8 aa, Artificial Sequence
  Description of Artificial Sequence: Synthetic peptide
VNPNSGGS

SEQ ID NO: 1440 - protein, 13 aa, Artificial Sequence
  Description of Artificial Sequence: Synthetic peptide
ARNLGPSFYFDYW

SEQ ID NO: 1441 - protein, 111 aa, Artificial Sequence
  Description of Artificial Sequence: Synthetic polypeptide
QSVLTQPPSVSGAPGQRVTISCTGSSSNIGAGYGVHWYQQLPGTAPKLLIYGNTNRPSGVPDRFSGFKSGTSASLAITGLQAEDEADYYCQSYDSSLSGWVFGGGTKLTVL

SEQ ID NO: 1442 - protein, 9 aa, Artificial Sequence
  Description of Artificial Sequence: Synthetic peptide
SSNIGAGYG

SEQ ID NO: 1443 - protein, 3 aa, Artificial Sequence
  Description of Artificial Sequence: Synthetic peptide
GNT

SEQ ID NO: 1444 - protein, 11 aa, Artificial Sequence
  Description of Artificial Sequence: Synthetic peptide
QSYDSSLSGWV

SEQ ID NO: 1445 - protein, 119 aa, Artificial Sequence
  Description of Artificial Sequence: Synthetic polypeptide
QVQLVESGGGLVQPGGSLRLSCAASGFTFRSYAMSWVRQAPGKGLEWVSAISGRGDNTYYADSVKGRFTISRDNSKNTLYLQMNSLRAEDTAVYYCAKMTSNAFAFDYWGQGTLVTVSS

SEQ ID NO: 1446 - protein, 8 aa, Artificial Sequence
  Description of Artificial Sequence: Synthetic peptide
GFTFRSYA

SEQ ID NO: 1447 - protein, 8 aa, Artificial Sequence
  Description of Artificial Sequence: Synthetic peptide
ISGRGDNT

SEQ ID NO: 1448 - protein, 12 aa, Artificial Sequence
  Description of Artificial Sequence: Synthetic peptide
AKMTSNAFAFDY

SEQ ID NO: 1449 - protein, 111 aa, Artificial Sequence [sequence omitted]

SEQ ID NO: 1450 - protein, 9 aa, Artificial Sequence
  Description of Artificial Sequence: Synthetic peptide
SSDVGSYNV

SEQ ID NO: 1451 - protein, 3 aa, Artificial Sequence
  Description of Artificial Sequence: Synthetic peptide
EVS

SEQ ID NO: 1452 - protein, 11 aa, Artificial Sequence
  Description of Artificial Sequence: Synthetic peptide
CSYAGSSIFVI

SEQ ID NO: 1453 - protein, 119 aa, Artificial Sequence [sequence omitted]

SEQ ID NO: 1454 - protein, 8 aa, Artificial Sequence
  Description of Artificial Sequence: Synthetic peptide
GFTFSHYV

SEQ ID NO: 1455 - protein, 8 aa, Artificial Sequence
  Description of Artificial Sequence: Synthetic peptide
ISSSGGWT

SEQ ID NO: 1456 - protein, 12 aa, Artificial Sequence
  Description of Artificial Sequence: Synthetic peptide
TRGLKMATIFDY

SEQ ID NO: 1457 - protein, 107 aa, Artificial Sequence
  Description of Artificial Sequence: Synthetic polypeptide
DIQMTQSPSSLSASVGDRVTITCRASQGISNWLAWYQQKPGKAPKLLIYGASSLQSGVPSRFSGSGSGTDFTLTISSLQPEDFATYYCQQYSSFPTTFGQGTKVEIK

SEQ ID NO: 1458 - protein, 6 aa, Artificial Sequence
  Description of Artificial Sequence: Synthetic peptide
QGISNW

SEQ ID NO: 1459 - protein, 3 aa, Artificial Sequence
  Description of Artificial Sequence: Synthetic peptide
GAS

SEQ ID NO: 1460 - protein, 9 aa, Artificial Sequence
  Description of Artificial Sequence: Synthetic peptide
QQYSSFPTT

SEQ ID NO: 1461 - protein, 117 aa, Artificial Sequence
  Description of Artificial Sequence: Synthetic polypeptide
EVQLLESGGGLVQPGGSLRLSCAASGFTFSSYAMSWVRQAPGKGLEWVSAINSQGKSTYYADSVKGRFTISRDNSKNTLYLQMNSLRAEDTAVYYCARWGDEGFDIWGQGTLVTVSS

SEQ ID NO: 1462 - protein, 8 aa, Artificial Sequence
  Description of Artificial Sequence: Synthetic peptide
GFTFSSYA

SEQ ID NO: 1463 - protein, 8 aa, Artificial Sequence
  Description of Artificial Sequence: Synthetic peptide
INSQGKST

SEQ ID NO: 1464 - protein, 10 aa, Artificial Sequence
  Description of Artificial Sequence: Synthetic peptide
ARWGDEGFDI

SEQ ID NO: 1465 - protein, 113 aa, Artificial Sequence [sequence omitted]

SEQ ID NO: 1466 - protein, 12 aa, Artificial Sequence
  Description of Artificial Sequence: Synthetic peptide
QSVLYSSSNRNY

SEQ ID NO: 1467 - protein, 3 aa, Artificial Sequence
  Description of Artificial Sequence: Synthetic peptide
WAS

SEQ ID NO: 1468 - protein, 9 aa, Artificial Sequence
  Description of Artificial Sequence: Synthetic peptide
QQYYSTPRT

SEQ ID NO: 1469 - protein, 117 aa, Artificial Sequence [sequence omitted]

SEQ ID NO: 1470 - protein, 8 aa, Artificial Sequence
  Description of Artificial Sequence: Synthetic peptide
GGSFSGYY

SEQ ID NO: 1471 - protein, 7 aa, Artificial Sequence
  Description of Artificial Sequence: Synthetic peptide
INHSGST

SEQ ID NO: 1472 - protein, 11 aa, Artificial Sequence
  Description of Artificial Sequence: Synthetic peptide
ARDKWTWYFDL

SEQ ID NO: 1473 - protein, 113 aa, Artificial Sequence
  Description of Artificial Sequence: Synthetic polypeptide
DIVMTQSPDSLAVSLGERATINCKSSQSVLNSGNQKNYLTWYQQKPGQPPKLLIYWASTRESGVPDRFSGSGSGTDFTLTISSLQAEDVAVYYCQSDYSYPYTFGQGTKLEIK

SEQ ID NO: 1474 - protein, 12 aa, Artificial Sequence
  Description of Artificial Sequence: Synthetic peptide
QSVLNSGNQKNY

SEQ ID NO: 1475 - protein, 3 aa, Artificial Sequence
  Description of Artificial Sequence: Synthetic peptide
WAS

SEQ ID NO: 1476 - protein, 9 aa, Artificial Sequence
  Description of Artificial Sequence: Synthetic peptide
QSDYSYPYT

SEQ ID NO: 1477 - protein, 120 aa, Artificial Sequence
  Description of Artificial Sequence: Synthetic polypeptide
QVQLVQSGAEVKKPGASVKVSCKASGYTFRSSYISWVRQAPGQGLEWMGWIYAGTGSPSYNQKLQGRVTMTTDTSTSTAYMELRSLRSDDTAVYYCARHRDYYSNSLTYWGQGTLVTVSS

SEQ ID NO: 1478 - protein, 8 aa, Artificial Sequence
  Description of Artificial Sequence: Synthetic peptide
GYTFRSSY

SEQ ID NO: 1479 - protein, 8 aa, Artificial Sequence
  Description of Artificial Sequence: Synthetic peptide
IYAGTGSP

SEQ ID NO: 1480 - protein, 13 aa, Artificial Sequence
  Description of Artificial Sequence: Synthetic peptide
ARHRDYYSNSLTY

SEQ ID NO: 1481 - protein, 107 aa, Artificial Sequence
  Description of Artificial Sequence: Synthetic polypeptide
YELTQDPAVSVALGQTVRITCQGDSLRSYYASWYQQKPGQAPVLVIYGKNNRPSGIPDRFSGSTSGNSASLTITGAQAEDEADYYCNSRDSPGNQWVFGGGTKVTVL

SEQ ID NO: 1482 - protein, 6 aa, Artificial Sequence
  Description of Artificial Sequence: Synthetic peptide
SLRSYY

SEQ ID NO: 1483 - protein, 3 aa, Artificial Sequence
  Description of Artificial Sequence: Synthetic peptide
GKN

SEQ ID NO: 1484 - protein, 11 aa, Artificial Sequence
  Description of Artificial Sequence: Synthetic peptide
NSRDSPGNQWV

SEQ ID NO: 1485 - protein, 122 aa, Artificial Sequence
  Description of Artificial Sequence: Synthetic polypeptide
QVQLVQSGGGLVQPGGSLRLSCAASGFTFDDYAMHWVRQAPGKGLEWVAGISWDSGSTGYADSVKGRFTISRDNAKNSLYLQMNSLRAEDTALYYCARDLGAYQWVEGFDYWGQGTLVTVSS

SEQ ID NO: 1486 - protein, 8 aa, Artificial Sequence
  Description of Artificial Sequence: Synthetic peptide
GFTFDDYA

SEQ ID NO: 1487 - protein, 8 aa, Artificial Sequence
  Description of Artificial Sequence: Synthetic peptide
ISWDSGST

SEQ ID NO: 1488 - protein, 15 aa, Artificial Sequence
  Description of Artificial Sequence: Synthetic peptide
ARDLGAYQWVEGFDY

SEQ ID NO: 1489 - protein, 111 aa, Artificial Sequence
  Description of Artificial Sequence: Synthetic polypeptide
DIVMTQSPDSLAVSLGERATINCKSSESVDSYANSFLHWYQQKPGQPPKLLIYRASTRESGVPDRFSGSGSGTDFTLTISSLQAEDVAVYYCQQSKEDPLTFGGGTKVEIK

SEQ ID NO: 1490 - protein, 10 aa, Artificial Sequence
  Description of Artificial Sequence: Synthetic peptide
ESVDSYANSF

SEQ ID NO: 1491 - protein, 3 aa, Artificial Sequence
  Description of Artificial Sequence: Synthetic peptide
RAS

SEQ ID NO: 1492 - protein, 9 aa, Artificial Sequence
  Description of Artificial Sequence: Synthetic peptide
QQSKEDPLT

SEQ ID NO: 1493 - protein, 118 aa, Artificial Sequence
  Description of Artificial Sequence: Synthetic polypeptide
QVQLVQSGAEVKKPGASVKVSCKASGYIFTAYTMHWVRQAPGQGLEWMGWIKPNNGLANYAQKFQGRVTMTRDTSISTAYMELSRLRSDDTAVYYCARSEITTEFDYWGQGTLVTVSS

SEQ ID NO: 1494 - protein, 8 aa, Artificial Sequence
  Description of Artificial Sequence: Synthetic peptide
GYIFTAYT

SEQ ID NO: 1495 - protein, 8 aa, Artificial Sequence
  Description of Artificial Sequence: Synthetic peptide
IKPNNGLA

SEQ ID NO: 1496 - protein, 11 aa, Artificial Sequence
  Description of Artificial Sequence: Synthetic peptide
ARSEITTEFDY

SEQ ID NO: 1497 - protein, 108 aa, Artificial Sequence [sequence omitted]

SEQ ID NO: 1498 - protein, 7 aa, Artificial Sequence
  Description of Artificial Sequence: Synthetic peptide
SSVSSIY

SEQ ID NO: 1499 - protein, 3 aa, Artificial Sequence
  Description of Artificial Sequence: Synthetic peptide
STS

SEQ ID NO: 1500 - protein, 9 aa, Artificial Sequence
  Description of Artificial Sequence: Synthetic peptide
QVYSGYPLT

SEQ ID NO: 1501 - protein, 115 aa, Artificial Sequence [sequence omitted]

SEQ ID NO: 1502 - protein, 8 aa, Artificial Sequence
  Description of Artificial Sequence: Synthetic peptide
GYTFTDYY

SEQ ID NO: 1503 - protein, 8 aa, Artificial Sequence
  Description of Artificial Sequence: Synthetic peptide
VNPNRRGT

SEQ ID NO: 1504 - protein, 8 aa, Artificial Sequence
  Description of Artificial Sequence: Synthetic peptide
ARANWLDY

SEQ ID NO: 1505 - protein, 111 aa, Artificial Sequence [sequence omitted]

SEQ ID NO: 1506 - protein, 10 aa, Artificial Sequence
  Description of Artificial Sequence: Synthetic peptide
QSVDYDGDSY

SEQ ID NO: 1507 - protein, 3 aa, Artificial Sequence
  Description of Artificial Sequence: Synthetic peptide
AAS

SEQ ID NO: 1508 - protein, 9 aa, Artificial Sequence
  Description of Artificial Sequence: Synthetic peptide
QQSHEDPYT

SEQ ID NO: 1509 - protein, 121 aa, Artificial Sequence [sequence omitted]

SEQ ID NO: 1510 - protein, 9 aa, Artificial Sequence
  Description of Artificial Sequence: Synthetic peptide
GYSITSGYS

SEQ ID NO: 1511 - protein, 7 aa, Artificial Sequence
  Description of Artificial Sequence: Synthetic peptide
ITYDGST

SEQ ID NO: 1512 - protein, 14 aa, Artificial Sequence
  Description of Artificial Sequence: Synthetic peptide
ARGSHYFGHWHFAV

SEQ ID NO: 1513 - protein, 107 aa, Artificial Sequence
  Description of Artificial Sequence: Synthetic polypeptide
EIVMTQSPATLSVSPGERATLSCRASQSIGTNIHWYQQKPGQAPRLLIYYASESISGIPARFSGSGSGTEFTLTISSLQSEDFAVYYCQQSWSWPTTFGGGTKVEIK

SEQ ID NO: 1514 - protein, 6 aa, Artificial Sequence
  Description of Artificial Sequence: Synthetic peptide
QSIGTN

SEQ ID NO: 1515 - protein, 3 aa, Artificial Sequence
  Description of Artificial Sequence: Synthetic peptide
YAS

SEQ ID NO: 1516 - protein, 9 aa, Artificial Sequence
  Description of Artificial Sequence: Synthetic peptide
QQSWSWPTT

SEQ ID NO: 1517 - protein, 123 aa, Artificial Sequence
  Description of Artificial Sequence: Synthetic polypeptide
QVQLVQSGAEVMKPGSSVKVSCKASGYTFSWYWLEWVRQAPGHGLEWMGEIDPGTFTTNYNEKFKARVTFTADTSTSTAYMELSSLRSEDTAVYYCARFSHFSGSNYDYFDYWGQGTLVTVSS

SEQ ID NO: 1518 - protein, 8 aa, Artificial Sequence
  Description of Artificial Sequence: Synthetic peptide
GYTFSWYW

SEQ ID NO: 1519 - protein, 8 aa, Artificial Sequence
  Description of Artificial Sequence: Synthetic peptide
IDPGTFTT

SEQ ID NO: 1520 - protein, 17 aa, Artificial Sequence
  Description of Artificial Sequence: Synthetic peptide
ARFSHFSGSNYDYFDYW

SEQ ID NO: 1521 - protein, 111 aa, Artificial Sequence
  Description of Artificial Sequence: Synthetic polypeptide
QSVLTQPPSVSAAPGQKVTISCSGSSSNIENNHVSWYQQLPGTAPKLLIYDNNKRPSGIPDRFSGSKSGTSATLGITGLQTGDEADYYCETWDTSLSAGRVFGGGTKLTVL

SEQ ID NO: 1522 - protein, 8 aa, Artificial Sequence
  Description of Artificial Sequence: Synthetic peptide
SSNIENNH

SEQ ID NO: 1523 - protein, 3 aa, Artificial Sequence
  Description of Artificial Sequence: Synthetic peptide
DNN

SEQ ID NO: 1524 - protein, 12 aa, Artificial Sequence
  Description of Artificial Sequence: Synthetic peptide
ETWDTSLSAGRV

SEQ ID NO: 1525 - protein, 120 aa, Artificial Sequence
  Description of Artificial Sequence: Synthetic polypeptide
QVQLVQSGAEVKKPGASVKVSCKASGYTFTSYDINWVRQATGQGLEWMGWMNPNSGNTGYAQKFQGRVTMTRNTSISTAYMELSSLRSEDTAVYYCARDPYYYYYGMDVWGQGTTVTVSS

SEQ ID NO: 1526 - protein, 8 aa, Artificial Sequence
  Description of Artificial Sequence: Synthetic peptide
GYTFTSYD

SEQ ID NO: 1527 - protein, 8 aa, Artificial Sequence
  Description of Artificial Sequence: Synthetic peptide
MNPNSGNT

SEQ ID NO: 1528 - protein, 13 aa, Artificial Sequence
  Description of Artificial Sequence: Synthetic peptide
ARDPYYYYYGMDV

SEQ ID NO: 1529 - protein, 106 aa, Artificial Sequence
  Description of Artificial Sequence: Synthetic polypeptide
DIQMTQSPSTLSASVGDRVTITCRASQSISSWLAWYQQKPGKAPKLLIYKASTLESGVPSRFSGSGSGTEFTLTISSLQPDDFATYYCQQYNTYWTFGQGTKVEIK

SEQ ID NO: 1530 - protein, 6 aa, Artificial Sequence
  Description of Artificial Sequence: Synthetic peptide
QSISSW

SEQ ID NO: 1531 - protein, 3 aa, Artificial Sequence
  Description of Artificial Sequence: Synthetic peptide
KAS

SEQ ID NO: 1532 - protein, 8 aa, Artificial Sequence
  Description of Artificial Sequence: Synthetic peptide
QQYNTYWT

SEQ ID NO: 1533 - protein, 122 aa, Artificial Sequence
  Description of Artificial Sequence: Synthetic polypeptide
EVQLLESGGGLVQPGGSLRLSCAASGFTFSHYIMMWVRQAPGKGLEWVSGIYSSGGITVYADSVKGRFTISRDNSKNTLYLQMNSLRAEDTAVYYCAYRRIGVPRRDEFDIWGQGTMVTVSS

SEQ ID NO: 1534 - protein, 8 aa, Artificial Sequence
  Description of Artificial Sequence: Synthetic peptide
GFTFSHYI

SEQ ID NO: 1535 - protein, 8 aa, Artificial Sequence
  Description of Artificial Sequence: Synthetic peptide
IYSSGGIT

SEQ ID NO: 1536 - protein, 15 aa, Artificial Sequence
  Description of Artificial Sequence: Synthetic peptide
AYRRIGVPRRDEFDI

SEQ ID NO: 1537 - protein, 107 aa, Artificial Sequence
  Description of Artificial Sequence: Synthetic polypeptide
EIVLTQSPVTLSLSPGERATLSCRASQSVSSYLAWYQQKPGQAPRLLIYDASNRATGIPARFSGSGSGTDFTLTISSLEPEDFAVYYCQQRSNWMYTFGQGTKLEIK

SEQ ID NO: 1538 - protein, 6 aa, Artificial Sequence
  Description of Artificial Sequence: Synthetic peptide
QSVSSY

SEQ ID NO: 1539 - protein, 3 aa, Artificial Sequence
  Description of Artificial Sequence: Synthetic peptide
DAS

SEQ ID NO: 1540 - protein, 9 aa, Artificial Sequence
  Description of Artificial Sequence: Synthetic peptide
QQRSNWMYT

SEQ ID NO: 1541 - protein, 123 aa, Artificial Sequence
  Description of Artificial Sequence: Synthetic polypeptide
QVQLVQSGAEVKKPGSSVKVSCKASGGTFSFYAISWVRQAPGQGLEWMGGFIPIFGAANYAQKFQGRVTITADESTSTAYMELSSLRSDDTAVYYCARIPSGSYYYDYDMDVWGQGTTVTVSS

SEQ ID NO: 1542 - protein, 8 aa, Artificial Sequence
  Description of Artificial Sequence: Synthetic peptide
GGTFSFYA

SEQ ID NO: 1543 - protein, 8 aa, Artificial Sequence
  Description of Artificial Sequence: Synthetic peptide
FIPIFGAA

SEQ ID NO: 1544 - protein, 16 aa, Artificial Sequence
  Description of Artificial Sequence: Synthetic peptide
ARIPSGSYYYDYDMDV

SEQ ID NO: 1545 - protein, 108 aa, Artificial Sequence
  Description of Artificial Sequence: Synthetic polypeptide
DIQMTQSPATLSLSPGERATLSCRASQSVSSYLAWYQQKPGQAPRLLIYDASNRATGIPARFSGSGSGTDFTLTISSLEPEDFAVYYCQQRSNWPMYTFGQGTKLEIK

SEQ ID NO: 1546 - protein, 6 aa, Artificial Sequence
  Description of Artificial Sequence: Synthetic peptide
QSVSSY

SEQ ID NO: 1547 - protein, 3 aa, Artificial Sequence
  Description of Artificial Sequence: Synthetic peptide
DAS

SEQ ID NO: 1548 - protein, 10 aa, Artificial Sequence
  Description of Artificial Sequence: Synthetic peptide
QQRSNWPMYT

SEQ ID NO: 1549 - protein, 118 aa, Artificial Sequence [sequence omitted]

SEQ ID NO: 1550 - protein, 8 aa, Artificial Sequence
  Description of Artificial Sequence: Synthetic peptide
GFTFSAYE

SEQ ID NO: 1551 - protein, 8 aa, Artificial Sequence
  Description of Artificial Sequence: Synthetic peptide
IGPSGGFT

SEQ ID NO: 1552 - protein, 11 aa, Artificial Sequence
  Description of Artificial Sequence: Synthetic peptide
ATEGDNDAFDI

SEQ ID NO: 1553 - protein, 112 aa, Artificial Sequence
  Description of Artificial Sequence: Synthetic polypeptide
DIVMTQTPLSLSVTPGQPASISCRSSKSLLHSNGNTYLYWFLQKPGQSPQFLIYRMSNLASGVPDRFSGSGSGTDFTLKISRVEAEDVGVYYCMQHLEYPYTFGGGTKVEIK

SEQ ID NO: 1554 - protein, 11 aa, Artificial Sequence
  Description of Artificial Sequence: Synthetic peptide
KSLLHSNGNTY

SEQ ID NO: 1555 - protein, 3 aa, Artificial Sequence
  Description of Artificial Sequence: Synthetic peptide
RMS

SEQ ID NO: 1556 - protein, 9 aa, Artificial Sequence
  Description of Artificial Sequence: Synthetic peptide
MQHLEYPYT

SEQ ID NO: 1557 - protein, 116 aa, Artificial Sequence
  Description of Artificial Sequence: Synthetic polypeptide
QVQLVQSGAEVKKPGASVKVSCKASGYAFTYYLIEWVRQAPGQGLEWIGVINPGSGGTNYNEKFKGRATITADKSTSTAYMELSSLRSEDTAVYFCARNWMNFDYWGQGTTVTVSS

SEQ ID NO: 1558 - protein, 8 aa, Artificial Sequence
  Description of Artificial Sequence: Synthetic peptide
GYAFTYYL

SEQ ID NO: 1559 - protein, 8 aa, Artificial Sequence
  Description of Artificial Sequence: Synthetic peptide
INPGSGGT

SEQ ID NO: 1560 - protein, 9 aa, Artificial Sequence
  Description of Artificial Sequence: Synthetic peptide
ARNWMNFDY

SEQ ID NO: 1561 - protein, 111 aa, Artificial Sequence
  Description of Artificial Sequence: Synthetic polypeptide
ESVLTQPPSVSGAPGQRVTISCTGSSSNIGAGYVVHWYQQLPGTAPKLLIYDNNKRPSGVPDRFSGSKSGTSASLAISGLRSEDEADYYCAAWDDRLNGPVFGGGTKLTVL

SEQ ID NO: 1562 - protein, 9 aa, Artificial Sequence
  Description of Artificial Sequence: Synthetic peptide
SSNIGAGYV

SEQ ID NO: 1563 - protein, 3 aa, Artificial Sequence
  Description of Artificial Sequence: Synthetic peptide
DNN

SEQ ID NO: 1564 - protein, 11 aa, Artificial Sequence
  Description of Artificial Sequence: Synthetic peptide
AAWDDRLNGPV

SEQ ID NO: 1565 - protein, 117 aa, Artificial Sequence
  Description of Artificial Sequence: Synthetic polypeptide
EVQLLESGGGLVQPGGSLRLSCAASGFTFSNAWMSWVRQAPGKGLEWVSYISSSGSTIYYADSVKGRFTISRDNSKNTLYLQMNSLRAEDTAVYYCAREGLWAFDYWGQGTLVTVSS

SEQ ID NO: 1566 - protein, 8 aa, Artificial Sequence
  Description of Artificial Sequence: Synthetic peptide
GFTFSNAW

SEQ ID NO: 1567 - protein, 8 aa, Artificial Sequence
  Description of Artificial Sequence: Synthetic peptide
ISSSGSTI

SEQ ID NO: 1568 - protein, 10 aa, Artificial Sequence
  Description of Artificial Sequence: Synthetic peptide
AREGLWAFDY

SEQ ID NO: 1569 - protein, 112 aa, Artificial Sequence
  Description of Artificial Sequence: Synthetic polypeptide
DIVMTQTPLSLSVTPGQPASISCKSSQSLLHTDGTTYLYWYLQKPGQPPQLLIYEVSNRFSGVPDRFSGSGSGTDFTLKISRVEAEDVGIYYCMQNIQLPWTFGQGTKVEIK

SEQ ID NO: 1570 - protein, 11 aa, Artificial Sequence
  Description of Artificial Sequence: Synthetic peptide
QSLLHTDGTTY

SEQ ID NO: 1571 - protein, 3 aa, Artificial Sequence
  Description of Artificial Sequence: Synthetic peptide
EVS

SEQ ID NO: 1572 - protein, 9 aa, Artificial Sequence
  Description of Artificial Sequence: Synthetic peptide
MQNIQLPWT

SEQ ID NO: 1573 - protein, 124 aa, Artificial Sequence
  Description of Artificial Sequence: Synthetic polypeptide
QVQLVQSGAEVKKPGASVKVSCKASGYTFTSYGINWVRQAPGQGLEWMGWISVYSGNTNYAQKVQGRVTMTADTSTSTAYMDLRSLRSDDTAVYYCAREGSSSSGDYYYGMDVWGQGTTVTVSS

SEQ ID NO: 1574 - protein, 8 aa, Artificial Sequence
  Description of Artificial Sequence: Synthetic peptide
GYTFTSYG

SEQ ID NO: 1575 - protein, 8 aa, Artificial Sequence
  Description of Artificial Sequence: Synthetic peptide
ISVYSGNT

SEQ ID NO: 1576 - protein, 17 aa, Artificial Sequence
  Description of Artificial Sequence: Synthetic peptide
AREGSSSSGDYYYGMDV

SEQ ID NO: 1577 - protein, 112 aa, Artificial Sequence
  Description of Artificial Sequence: Synthetic polypeptide
DIVMTQSPDSLAVSLGERATINCKSSHSVLYSSNQKNYLAWYQQKPGQPPKLLIYWASTRESGVPDRFSGSGSGTDFTLTISSLQAEDVAVYYCHQYLSSLTFGQGTKLEIK

SEQ ID NO: 1578 - protein, 12 aa, Artificial Sequence
  Description of Artificial Sequence: Synthetic peptide
HSVLYSSNQKNY

SEQ ID NO: 1579 - protein, 3 aa, Artificial Sequence
  Description of Artificial Sequence: Synthetic peptide
WAS

SEQ ID NO: 1580 - protein, 8 aa, Artificial Sequence
  Description of Artificial Sequence: Synthetic peptide
HQYLSSLT

SEQ ID NO: 1581 - protein, 126 aa, Artificial Sequence
  Description of Artificial Sequence: Synthetic polypeptide
QVQLVQSGSELKKPGASVKVSCKASGYTFTNYGMNWVRQAPGQGLEWMGWINTYTGEPTYADDFTGRFVFSLDTSVSTAYLQISSLKAEDTAVYYCARNPINYYGINYEGYVMDYWGQGTLVTVSS

SEQ ID NO: 1582 - protein, 8 aa, Artificial Sequence
  Description of Artificial Sequence: Synthetic peptide
GYTFTNYG

SEQ ID NO: 1583 - protein, 8 aa, Artificial Sequence
  Description of Artificial Sequence: Synthetic peptide
INTYTGEP

SEQ ID NO: 1584 - protein, 19 aa, Artificial Sequence
  Description of Artificial Sequence: Synthetic peptide
ARNPINYYGINYEGYVMDY

SEQ ID NO: 1585 - protein, 111 aa, Artificial Sequence
  Description of Artificial Sequence: Synthetic polypeptide
DIALTQPASVSGSPGQSITISCTGTSSDIGGYNSVSWYQQHPGKAPKLMIYGVNNRPSGVSNRFSGSKSGNTASLTISGLQAEDEADYYCSSYDIESATPVFGGGTKLTVL

SEQ ID NO: 1586 - protein, 9 aa, Artificial Sequence
  Description of Artificial Sequence: Synthetic peptide
SSDIGGYNS

SEQ ID NO: 1587 - protein, 3 aa, Artificial Sequence
  Description of Artificial Sequence: Synthetic peptide
GVN

SEQ ID NO: 1588 - protein, 11 aa, Artificial Sequence
  Description of Artificial Sequence: Synthetic peptide
SSYDIESATPV

SEQ ID NO: 1589 - protein, 120 aa, Artificial Sequence
  Description of Artificial Sequence: Synthetic polypeptide
QVELVQSGAEVKKPGESLKISCKGSGYSFTSYWIGWVRQAPGKGLEWMGIIDPGDSRTRYSPSFQGQVTISADKSISTAYLQWSSLKASDTAMYYCARGQLYGGTYMDGWGQGTLVTVSS

SEQ ID NO: 1590 - protein, 8 aa, Artificial Sequence
  Description of Artificial Sequence: Synthetic peptide
GYSFTSYW

SEQ ID NO: 1591 - protein, 8 aa, Artificial Sequence
  Description of Artificial Sequence: Synthetic peptide
IDPGDSRT

SEQ ID NO: 1592 - protein, 13 aa, Artificial Sequence
  Description of Artificial Sequence: Synthetic peptide
ARGQLYGGTYMDG

SEQ ID NO: 1593 - protein, 106 aa, Artificial Sequence
  Description of Artificial Sequence: Synthetic polypeptide
DIELTQSPAIMSASPGEKVTMTCSASSSVSYMHWYQQKSGTSPKRWIYDTSKLASGVPGRFSGSGSGNSYSLTISSVEAEDDATYYCQQWSKHPLTFGSGTKVEIK

SEQ ID NO: 1594 - protein, 5 aa, Artificial Sequence
  Description of Artificial Sequence: Synthetic peptide
SSVSY

SEQ ID NO: 1595 - protein, 3 aa, Artificial Sequence
  Description of Artificial Sequence: Synthetic peptide
DTS

SEQ ID NO: 1596 - protein, 9 aa, Artificial Sequence
  Description of Artificial Sequence: Synthetic peptide
QQWSKHPLT

SEQ ID NO: 1597 - protein, 119 aa, Artificial Sequence
  Description of Artificial Sequence: Synthetic polypeptide
QVQLQQSGPELEKPGASVKISCKASGYSFTGYTMNWVKQSHGKSLEWIGLITPYNGASSYNQKFRGKATLTVDKSSSTAYMDLLSLTSEDSAVYFCARGGYDGRGFDYWGSGTPVTVSS

SEQ ID NO: 1598 - protein, 8 aa, Artificial Sequence
  Description of Artificial Sequence: Synthetic peptide
GYSFTGYT

SEQ ID NO: 1599 - protein, 8 aa, Artificial Sequence
  Description of Artificial Sequence: Synthetic peptide
ITPYNGAS

SEQ ID NO: 1600 - protein, 12 aa, Artificial Sequence
  Description of Artificial Sequence: Synthetic peptide
ARGGYDGRGFDY

SEQ ID NO: 1601 - protein, 107 aa, Artificial Sequence
  Description of Artificial Sequence: Synthetic polypeptide
DIQMTQSPSSLSASVGDRVTITCKASQDVRNTVAWYQQKPGKAPKLLIYSSSYRNTGVPDRFSGSGSGTDFTLTISSLQAEDVAVYYCQQHYITPYTFGGGTKVEIK

SEQ ID NO: 1602 - protein, 6 aa, Artificial Sequence
  Description of Artificial Sequence: Synthetic peptide
QDVRNT

SEQ ID NO: 1603 - protein, 3 aa, Artificial Sequence
  Description of Artificial Sequence: Synthetic peptide
SSS

SEQ ID NO: 1604 - protein, 9 aa, Artificial Sequence
  Description of Artificial Sequence: Synthetic peptide
QQHYITPYT

SEQ ID NO: 1605 - protein, 115 aa, Artificial Sequence
  Description of Artificial Sequence: Synthetic polypeptide
QVQLQESGPGLVKPSETLSLTCTVSGFSLLSYGVHWVRQPPGKGLEWLGVIWTGGTTNYNSALMSRFTISKDDSKNTVYLKMNSLKTEDTAIYYCARYYYGMDYWGQGTLVTVSS

SEQ ID NO: 1606 - protein, 8 aa, Artificial Sequence
  Description of Artificial Sequence: Synthetic peptide
GFSLLSYG

SEQ ID NO: 1607 - protein, 7 aa, Artificial Sequence
  Description of Artificial Sequence: Synthetic peptide
IWTGGTT

SEQ ID NO: 1608 - protein, 9 aa, Artificial Sequence
  Description of Artificial Sequence: Synthetic peptide
ARYYYGMDY

SEQ ID NO: 1609 - protein, 108 aa, Artificial Sequence
  Description of Artificial Sequence: Synthetic polypeptide
DIQLTQSPSSLSASVGDRVTMTCSASSSVSSSYLYWYQQKPGKAPKLWIYSTSNLASGVPARFSGSGSGTDFTLTISSLQPEDSASYFCHQWNRYPYTFGGGTRLEIK

SEQ ID NO: 1610 - protein, 7 aa, Artificial Sequence
  Description of Artificial Sequence: Synthetic peptide
SSVSSSY

SEQ ID NO: 1611 - protein, 3 aa, Artificial Sequence
  Description of Artificial Sequence: Synthetic peptide
STS

SEQ ID NO: 1612 - protein, 9 aa, Artificial Sequence
  Description of Artificial Sequence: Synthetic peptide
HQWNRYPYT

SEQ ID NO: 1613 - protein, 119 aa, Artificial Sequence
  Description of Artificial Sequence: Synthetic polypeptide
QVQLQQSGAEVKKPGASVKVSCEASGYTFPSYVLHWVKQAPGQGLEWIGYINPYNDGTQYNEKFKGKATLTRDTSINTAYMELSRLRSDDTAVYYCARGFGGSYGFAYWGQGTLVTVSS

SEQ ID NO: 1614 - protein, 8 aa, Artificial Sequence
  Description of Artificial Sequence: Synthetic peptide
GYTFPSYV

SEQ ID NO: 1615 - protein, 8 aa, Artificial Sequence
  Description of Artificial Sequence: Synthetic peptide
INPYNDGT

SEQ ID NO: 1616 - protein, 12 aa, Artificial Sequence
  Description of Artificial Sequence: Synthetic peptide
ARGFGGSYGFAY

SEQ ID NO: 1617 - protein, 106 aa, Artificial Sequence
  Description of Artificial Sequence: Synthetic polypeptide
QVVLTQSPVIMSASPGEKVTMTCSASSSISYMYWYQQKPGTSPKRWIYDTSKLASGVPARFSGSGSGTSYSLTISNMEAGDAATYYCHQRDSYPWTFGGGTNLEIK

SEQ ID NO: 1618 - protein, 5 aa, Artificial Sequence
  Description of Artificial Sequence: Synthetic peptide
SSISY

SEQ ID NO: 1619 - protein, 3 aa, Artificial Sequence
  Description of Artificial Sequence: Synthetic peptide
DTS

SEQ ID NO: 1620 - protein, 9 aa, Artificial Sequence
  Description of Artificial Sequence: Synthetic peptide
HQRDSYPWT

SEQ ID NO: 1621 - protein, 113 aa, Artificial Sequence
  Description of Artificial Sequence: Synthetic polypeptide
QVQLKESGPDLVAPSQSLSITCTVSGFSLSKFGVNWVRQPPGKGLEWLGVIWGDGSTSYNSGLISRLSISKENSKSQVFLKLNSLQADDTATYYCVKPGGDYWGHGTSVTVSS

SEQ ID NO: 1622 - protein, 8 aa, Artificial Sequence
  Description of Artificial Sequence: Synthetic peptide
GFSLSKFG

SEQ ID NO: 1623 - protein, 7 aa, Artificial Sequence
  Description of Artificial Sequence: Synthetic peptide
IWGDGST

SEQ ID NO: 1624 - protein, 7 aa, Artificial Sequence
  Description of Artificial Sequence: Synthetic peptide
VKPGGDY

SEQ ID NO: 1625 - protein, 112 aa, Artificial Sequence
  Description of Artificial Sequence: Synthetic polypeptide
DIQMTQSPSSLSASVGDRVTITCRSSETLVHSSGNTYLEWYQQKPGKAPKLLIYRVSNRFSGVPSRFSGSGSGTDFTLTISSLQPEDFATYYCFQGSFNPLTFGQGTKVEIK

SEQ ID NO: 1626 - protein, 11 aa, Artificial Sequence
  Description of Artificial Sequence: Synthetic peptide
ETLVHSSGNTY

SEQ ID NO: 1627 - protein, 3 aa, Artificial Sequence
  Description of Artificial Sequence: Synthetic peptide
RVS

SEQ ID NO: 1628 - protein, 9 aa, Artificial Sequence
  Description of Artificial Sequence: Synthetic peptide
FQGSFNPLT

SEQ ID NO: 1629 - protein, 120 aa, Artificial Sequence
  Description of Artificial Sequence: Synthetic polypeptide
EVQLVESGGGLVQPGGSLRLSCAASGFSFSDFAMSWVRQAPGKGLEWVATIGRVAFHTYYPDSMKGRFTISRDNSKNTLYLQMNSLRAEDTAVYYCARHRGFDVGHFDFWGQGTLVTVSS

SEQ ID NO: 1630 - protein, 8 aa, Artificial Sequence
  Description of Artificial Sequence: Synthetic peptide
GFSFSDFA

SEQ ID NO: 1631 - protein, 8 aa, Artificial Sequence
  Description of Artificial Sequence: Synthetic peptide
IGRVAFHT

SEQ ID NO: 1632 - protein, 13 aa, Artificial Sequence
  Description of Artificial Sequence: Synthetic peptide
ARHRGFDVGHFDF

SEQ ID NO: 1633 - protein, 107 aa, Artificial Sequence
  Description of Artificial Sequence: Synthetic polypeptide
DIVMTQSHKFMSTSVGDRVSITCKASQDVSTAVAWYQQKPGQSPKLLIYSASYRYTGVPDRFTGSGSGTDFTFTISSVQAEDLAVYYCQQHYSTPWTFGGGTKLELK

SEQ ID NO: 1634 - protein, 6 aa, Artificial Sequence
  Description of Artificial Sequence: Synthetic peptide
QDVSTA

SEQ ID NO: 1635 - protein, 3 aa, Artificial Sequence
  Description of Artificial Sequence: Synthetic peptide
SAS

SEQ ID NO: 1636 - protein, 9 aa, Artificial Sequence
  Description of Artificial Sequence: Synthetic peptide
QQHYSTPWT

SEQ ID NO: 1637 - protein, 122 aa, Artificial Sequence
  Description of Artificial Sequence: Synthetic polypeptide
EVQLKESGPGLVAPSQSLSITCTVSGFSLSRYSVHWVRQPPGKGLEWLGMIWGGGSTDYNSALKSRLSISKDNSKSQVFLKMNSLQTDDTAMYYCARSGVREGRAQAWFAYWGQGTLVTVSA

SEQ ID NO: 1638 - protein, 8 aa, Artificial Sequence
  Description of Artificial Sequence: Synthetic peptide
GFSLSRYS

SEQ ID NO: 1639 - protein, 7 aa, Artificial Sequence
  Description of Artificial Sequence: Synthetic peptide
IWGGGST

SEQ ID NO: 1640 - protein, 16 aa, Artificial Sequence
  Description of Artificial Sequence: Synthetic peptide
ARSGVREGRAQAWFAY

SEQ ID NO: 1641 - protein, 107 aa, Artificial Sequence
  Description of Artificial Sequence: Synthetic polypeptide
DIQMTQSPSSLSASVGDRVTITCRASENIYSYLAWYQQKPGKAPKLLIYNAKTLAEGVPSRFSGSGSGTDFTLTISSLQPEDFATYYCQHHYGTPRTFGGGTKVEIK

SEQ ID NO: 1642 - protein, 6 aa, Artificial Sequence
  Description of Artificial Sequence: Synthetic peptide
ENIYSY

SEQ ID NO: 1643 - protein, 3 aa, Artificial Sequence
  Description of Artificial Sequence: Synthetic peptide
NAK

SEQ ID NO: 1644 - protein, 9 aa, Artificial Sequence
  Description of Artificial Sequence: Synthetic peptide
QHHYGTPRT

SEQ ID NO: 1645 - protein, 125 aa, Artificial Sequence
  Description of Artificial Sequence: Synthetic polypeptide
QVQLVQSGAEVKKPGASVKVSCKASGYTFTSYWMNWVRQAPGQGLEWMGRIDPYDSETHYAQKLQGRVTMTTDTSTSTAYMELRSLRSDDTAVYYCARGGYDFDVGTLYWFFDVWGQGTTVTVSS

SEQ ID NO: 1646 - protein, 8 aa, Artificial Sequence
  Description of Artificial Sequence: Synthetic peptide
GYTFTSYW

SEQ ID NO: 1647 - protein, 8 aa, Artificial Sequence
  Description of Artificial Sequence: Synthetic peptide
IDPYDSET

SEQ ID NO: 1648 - protein, 18 aa, Artificial Sequence
  Description of Artificial Sequence: Synthetic peptide
ARGGYDFDVGTLYWFFDV

SEQ ID NO: 1649 - protein, 108 aa, Artificial Sequence
  Description of Artificial Sequence: Synthetic polypeptide
QAVVTQEPSLTVSPGGTVTLTCRSSTGAVTTSNYANWFQQKPGQAPRTLIGGTNNRAPGVPARFSGSLLGGKAALTLSGAQPEDEAEYYCALWYSNHWVFGGGTKLTV

SEQ ID NO: 1650 - protein, 9 aa, Artificial Sequence
  Description of Artificial Sequence: Synthetic peptide
TGAVTTSNY

SEQ ID NO: 1651 - protein, 3 aa, Artificial Sequence
  Description of Artificial Sequence: Synthetic peptide
GTN

SEQ ID NO: 1652 - protein, 9 aa, Artificial Sequence
  Description of Artificial Sequence: Synthetic peptide
ALWYSNHWV

SEQ ID NO: 1653 - protein, 121 aa, Artificial Sequence
  Description of Artificial Sequence: Synthetic polypeptide
QVQLVQSGAEVKKPGASVKISCKVSGYTLRGYWIEWVRQAPGKGLEWIGQILPGTGRTNYNEKFKGRVTMTADTSTDTAYMELSSLRSEDTAVYYCARFDGNYGYYAMDYWGQGTTVTVSS

SEQ ID NO: 1654 - protein, 11 aa, Artificial Sequence
  Description of Artificial Sequence: Synthetic peptide
GASVKISCKVS

SEQ ID NO: 1655 - protein, 8 aa, Artificial Sequence
  Description of Artificial Sequence: Synthetic peptide
ILPGTGRT

SEQ ID NO: 1656 - protein, 15 aa, Artificial Sequence
  Description of Artificial Sequence: Synthetic peptide
ARFDGNYGYYAMDYW

SEQ ID NO: 1657 - protein, 108 aa, Artificial Sequence
  Description of Artificial Sequence: Synthetic polypeptide
DIVLTQSPATLSLSPGERATLSCRASQSVRSNYLAWYQQKPGQAPRLLIYGASSRATGVPARFSGSGSGTDFTLTISSLEPEDFAVYYCQQYSNFPITFGQGTKVEIK

SEQ ID NO: 1658 - protein, 7 aa, Artificial Sequence
  Description of Artificial Sequence: Synthetic peptide
QSVRSNY

SEQ ID NO: 1659 - protein, 3 aa, Artificial Sequence
  Description of Artificial Sequence: Synthetic peptide
GAS

SEQ ID NO: 1660 - protein, 9 aa, Artificial Sequence
  Description of Artificial Sequence: Synthetic peptide
QQYSNFPIT

SEQ ID NO: 1661 - protein, 115 aa, Artificial Sequence
  Description of Artificial Sequence: Synthetic polypeptide
EVQLVESGGGLVQPGGSLRLSCAASGFTFSSSGMSWVRQAPGKGLEWVSVIASSGSNTYYADSVKGRFTISRDNSKNTLYLQMNSLRAEDTAVYYCARSIFYTTWGQGTLVTVSS

SEQ ID NO: 1662 - protein, 8 aa, Artificial Sequence
  Description of Artificial Sequence: Synthetic peptide
GFTFSSSG

SEQ ID NO: 1663 - protein, 8 aa, Artificial Sequence
  Description of Artificial Sequence: Synthetic peptide
IASSGSNT

SEQ ID NO: 1664 - protein, 8 aa, Artificial Sequence
  Description of Artificial Sequence: Synthetic peptide
ARSIFYTT

SEQ ID NO: 1665 - protein, 107 aa, Artificial Sequence
  Description of Artificial Sequence: Synthetic polypeptide
DIQMTQSPSSLSASVGDRVTITCRASQYFSSYLAWYQQKPGKAPKLLIYGASSRASGVPSRFSGSGSGTDFTLTISSLQPEDFATYYCQQYLGSPPTFGQGTKVEIK

SEQ ID NO: 1666 - protein, 6 aa, Artificial Sequence
  Description of Artificial Sequence: Synthetic peptide
QYFSSY

SEQ ID NO: 1667 - protein, 3 aa, Artificial Sequence
  Description of Artificial Sequence: Synthetic peptide
GAS

SEQ ID NO: 1668 - protein, 9 aa, Artificial Sequence
  Description of Artificial Sequence: Synthetic peptide
QQYLGSPPT

SEQ ID NO: 1669 - protein, 123 aa, Artificial Sequence [sequence omitted]

SEQ ID NO: 1670 - protein, 8 aa, Artificial Sequence
  Description of Artificial Sequence: Synthetic peptide
GFTFSSYA

SEQ ID NO: 1671 - protein, 8 aa, Artificial Sequence
  Description of Artificial Sequence: Synthetic peptide
ISPAGGYT

SEQ ID NO: 1672 - protein, 16 aa, Artificial Sequence
  Description of Artificial Sequence: Synthetic peptide
ARGELPYYRMSKVMDV

SEQ ID NO: 1673 - protein, 110 aa, Artificial Sequence
  Description of Artificial Sequence: Synthetic polypeptide
QSVLTQPPSASGTPGQRVTISCSGSNTNIGKNYVSWYQQLPGTAPKLLIYANSNRPSGVPDRFSGSKSGTSASLAISGLRSEDEADYYCASWDASLNGWVFGGGTKLTVL

SEQ ID NO: 1674 - protein, 8 aa, Artificial Sequence
  Description of Artificial Sequence: Synthetic peptide
NTNIGKNY

SEQ ID NO: 1675 - protein, 3 aa, Artificial Sequence
  Description of Artificial Sequence: Synthetic peptide
ANS

SEQ ID NO: 1676 - protein, 11 aa, Artificial Sequence
  Description of Artificial Sequence: Synthetic peptide
ASWDASLNGWV

SEQ ID NO: 1677 - protein, 121 aa, Artificial Sequence
  Description of Artificial Sequence: Synthetic polypeptide
EVQLLESGGGLVQPGGSLRLSCAASGFTFSNAWMSWVRQAPGKGLEWVSSISVGGHRTYYADSVKGRSTISRDNSKNTLYLQMNSLRAEDTAVYYCARIRVGPSGGAFDYWGQGTLVTVSS

SEQ ID NO: 1678 - protein, 8 aa, Artificial Sequence
  Description of Artificial Sequence: Synthetic peptide
GFTFSNAW

SEQ ID NO: 1679 - protein, 8 aa, Artificial Sequence
  Description of Artificial Sequence: Synthetic peptide
ISVGGHRT

SEQ ID NO: 1680 - protein, 14 aa, Artificial Sequence
  Description of Artificial Sequence: Synthetic peptide
ARIRVGPSGGAFDY

SEQ ID NO: 1681 - protein, 107 aa, Artificial Sequence
  Description of Artificial Sequence: Synthetic polypeptide
EIVLTQSPATLSLSPGERATLSCRASQSVSSYLAWYQQKPGQAPRLLIYDASNRATGIPARFSGSGSGTDFTLTISSLEPEDFAVYYCQQRSNWPLTFGGGTKVEIK

SEQ ID NO: 1682 - protein, 6 aa, Artificial Sequence
  Description of Artificial Sequence: Synthetic peptide
QSVSSY

SEQ ID NO: 1683 - protein, 3 aa, Artificial Sequence
  Description of Artificial Sequence: Synthetic peptide
DAS

SEQ ID NO: 1684 - protein, 9 aa, Artificial Sequence
  Description of Artificial Sequence: Synthetic peptide
QQRSNWPLT

SEQ ID NO: 1685 - protein, 124 aa, Artificial Sequence
  Description of Artificial Sequence: Synthetic polypeptide
EVQLVESGGGLVRPGGSLRLSCAASGFTFSNYDMHWVRQATGKGLEWVSAITAAGDIYYPGSVKGRFTISRENAKNSLYLQMNSLRAGDTAVYYCARGRYSGSGSYYNDWFDPWGQGTLVTVSS

SEQ ID NO: 1686 - protein, 8 aa, Artificial Sequence
  Description of Artificial Sequence: Synthetic peptide
GFTFSNYD

SEQ ID NO: 1687 - protein, 7 aa, Artificial Sequence
  Description of Artificial Sequence: Synthetic peptide
ITAAGDI

SEQ ID NO: 1688 - protein, 18 aa, Artificial Sequence
  Description of Artificial Sequence: Synthetic peptide
ARGRYSGSGSYYNDWFDP

SEQ ID NO: 1689 - protein, 113 aa, Artificial Sequence [sequence omitted]

SEQ ID NO: 1690 - protein, 12 aa, Artificial Sequence
  Description of Artificial Sequence: Synthetic peptide
QSVLYRSNNRNF

SEQ ID NO: 1691 - protein, 3 aa, Artificial Sequence
  Description of Artificial Sequence: Synthetic peptide
WAS

SEQ ID NO: 1692 - protein, 9 aa, Artificial Sequence
  Description of Artificial Sequence: Synthetic peptide
QQYYTTPYT

SEQ ID NO: 1693 - protein, 118 aa, Artificial Sequence [sequence omitted]

SEQ ID NO: 1694 - protein, 8 aa, Artificial Sequence
  Description of Artificial Sequence: Synthetic peptide
GFTFNNYA

SEQ ID NO: 1695 - protein, 8 aa, Artificial Sequence
  Description of Artificial Sequence: Synthetic peptide
ISGSGGTT

SEQ ID NO: 1696 - protein, 11 aa, Artificial Sequence
  Description of Artificial Sequence: Synthetic peptide
AKDSNWGNFDL

SEQ ID NO: 1697 - protein, 109 aa, Artificial Sequence [sequence omitted]

SEQ ID NO: 1698 - protein, 9 aa, Artificial Sequence
  Description of Artificial Sequence: Synthetic peptide
SSDVGGYNS

SEQ ID NO: 1699 - protein, 3 aa, Artificial Sequence
  Description of Artificial Sequence: Synthetic peptide
EVS

SEQ ID NO: 1700 - protein, 9 aa, Artificial Sequence
  Description of Artificial Sequence: Synthetic peptide
NSYTSTSMV

SEQ ID NO: 1701 - protein, 115 aa, Artificial Sequence [sequence omitted]

SEQ ID NO: 1702 - protein, 8 aa, Artificial Sequence
  Description of Artificial Sequence: Synthetic peptide
GYTLTSYG

SEQ ID NO: 1703 - protein, 8 aa, Artificial Sequence
  Description of Artificial Sequence: Synthetic peptide
VSFYNGNT

SEQ ID NO: 1704 - protein, 8 aa, Artificial Sequence
  Description of Artificial Sequence: Synthetic peptide
ARGYGMDV

SEQ ID NO: 1705 - protein, 107 aa, Artificial Sequence
  Description of Artificial Sequence: Synthetic polypeptide
DIQMTQSPSSLSASVGDRVTITCRASQGISSALAWYQQKPGKAPKLLIYSASYRYTGVPSRFSGSGSGTDFTFTISSLQPEDIATYYCQQRYSLWRTFGQGTKLEIK

SEQ ID NO: 1706 - protein, 6 aa, Artificial Sequence
  Description of Artificial Sequence: Synthetic peptide
QGISSA

SEQ ID NO: 1707 - protein, 3 aa, Artificial Sequence
  Description of Artificial Sequence: Synthetic peptide
SAS

SEQ ID NO: 1708 - protein, 9 aa, Artificial Sequence
  Description of Artificial Sequence: Synthetic peptide
QQRYSLWRT

SEQ ID NO: 1709 - protein, 118 aa, Artificial Sequence
  Description of Artificial Sequence: Synthetic polypeptide
QVQLVQSGAEVKKPGASVKVSCKASGYTFTSYYMHWVRQAPGQGLEWMGEISPFGGRTNYNEKFKSRVTMTRDTSTSTVYMELSSLRSEDTAVYYCARERPLYASDLWGQGTTVTVSS

SEQ ID NO: 1710 - protein, 8 aa, Artificial Sequence
  Description of Artificial Sequence: Synthetic peptide
GYTFTSYY

SEQ ID NO: 1711 - protein, 8 aa, Artificial Sequence
  Description of Artificial Sequence: Synthetic peptide
ISPFGGRT

SEQ ID NO: 1712 - protein, 11 aa, Artificial Sequence
  Description of Artificial Sequence: Synthetic peptide
ARERPLYASDL

SEQ ID NO: 1713 - protein, 107 aa, Artificial Sequence
  Description of Artificial Sequence: Synthetic polypeptide
EIVLTQSPATLSLSPGERATLSCRASQSVSSYLAWYQQKPGQAPRLLIYDASNRATGIPARFSGSGSGTDFTLTISSLEPEDFAVYYCQQRSNWPPAFGQGTKVEIK

SEQ ID NO: 1714 - protein, 6 aa, Artificial Sequence
  Description of Artificial Sequence: Synthetic peptide
QSVSSY

SEQ ID NO: 1715 - protein, 3 aa, Artificial Sequence
  Description of Artificial Sequence: Synthetic peptide
DAS

SEQ ID NO: 1716 - protein, 9 aa, Artificial Sequence
  Description of Artificial Sequence: Synthetic peptide
QQRSNWPPA

SEQ ID NO: 1717 - protein, 127 aa, Artificial Sequence
  Description of Artificial Sequence: Synthetic polypeptide
QLQLQESGPGLVKPSETLSLTCTVSGGSINSSSYYWGWLRQSPGKGLEWIGSFFYTGSTYYNPSLRSRLTISVDTSKNQFSLMLSSVTAADTAVYYCARQSTYYYGSGNYYGWFDRWDQGTLVTVSS

SEQ ID NO: 1718 - protein, 10 aa, Artificial Sequence
  Description of Artificial Sequence: Synthetic peptide
GGSINSSSYY

SEQ ID NO: 1719 - protein, 7 aa, Artificial Sequence
  Description of Artificial Sequence: Synthetic peptide
FFYTGST

SEQ ID NO: 1720 - protein, 19 aa, Artificial Sequence
  Description of Artificial Sequence: Synthetic peptide
ARQSTYYYGSGNYYGWFDR

SEQ ID NO: 1721 - protein, 108 aa, Artificial Sequence
  Description of Artificial Sequence: Synthetic polypeptide
DIQMTQSPSSLSASVGDRVSITCRPSQSFSRYINWYQQKPGKAPKLLIHAASSLVGGVPSRFSGSGSGTDFTLTISSLQPEDFATYYCQQTYSNPPITFGQGTRLEMK

SEQ ID NO: 1722 - protein, 6 aa, Artificial Sequence
  Description of Artificial Sequence: Synthetic peptide
QSFSRY

SEQ ID NO: 1723 - protein, 3 aa, Artificial Sequence
  Description of Artificial Sequence: Synthetic peptide
AAS

SEQ ID NO: 1724 - protein, 10 aa, Artificial Sequence
  Description of Artificial Sequence: Synthetic peptide
QQTYSNPPIT

SEQ ID NO: 1725 - protein, 120 aa, Artificial Sequence
  Description of Artificial Sequence: Synthetic polypeptide
QVQLVESGGGLVKPGGSLRLSCAASGFTFSDYYMNWIRQAPGKGLEWVSYISSSGSIIYYADSVKGRFTISRDNAKNSLYLQMNSLRAEDTAVYYCAREGRIAARGMDVWGQGTTVTVSS

SEQ ID NO: 1726 - protein, 8 aa, Artificial Sequence
  Description of Artificial Sequence: Synthetic peptide
GFTFSDYY

SEQ ID NO: 1727 - protein, 8 aa, Artificial Sequence
  Description of Artificial Sequence: Synthetic peptide
ISSSGSII

SEQ ID NO: 1728 - protein, 13 aa, Artificial Sequence
  Description of Artificial Sequence: Synthetic peptide
AREGRIAARGMDV

SEQ ID NO: 1729 - protein, 107 aa, Artificial Sequence
  Description of Artificial Sequence: Synthetic polypeptide
DIQMTQSPSSLSASLGERVSLTCRASQDIGSSLNWLQQGPDGTIKRLIYATSSLDSGVPKRFSGSRSGSDYSLTISSLESEDFVDYYCLQYVSSPPTFGAGTKLELK

SEQ ID NO: 1730 - protein, 6 aa, Artificial Sequence
  Description of Artificial Sequence: Synthetic peptide
QDIGSS

SEQ ID NO: 1731 - protein, 3 aa, Artificial Sequence
  Description of Artificial Sequence: Synthetic peptide
ATS

SEQ ID NO: 1732 - protein, 9 aa, Artificial Sequence
  Description of Artificial Sequence: Synthetic peptide
LQYVSSPPT

SEQ ID NO: 1733 - protein, 120 aa, Artificial Sequence
  Description of Artificial Sequence: Synthetic polypeptide
EVQLQQSGPELEKPGASVKLSCKASGYSFTGYNMNWVKQSHGKSLEWIGHIDPYYGDTSYNQKFRGKATLTVDKSSSTAYMQLKSLTSEDSAVYYCVKGGYYGHWYFDVWGAGTTVTVSS

SEQ ID NO: 1734 - protein, 8 aa, Artificial Sequence
  Description of Artificial Sequence: Synthetic peptide
GYSFTGYN

SEQ ID NO: 1735 - protein, 8 aa, Artificial Sequence
  Description of Artificial Sequence: Synthetic peptide
IDPYYGDT

SEQ ID NO: 1736 - protein, 13 aa, Artificial Sequence
  Description of Artificial Sequence: Synthetic peptide
VKGGYYGHWYFDV

SEQ ID NO: 1737 - protein, 112 aa, Artificial Sequence
  Description of Artificial Sequence: Synthetic polypeptide
DVVMTQTPLSLPVSLGDQASISCRSSQSLVHSNGNTYLYWYLQKPGQSPKPLIYRVSNRFSGVPDRFSGSGSGTDFTLKISRVEAEDLGVYFCFQGTHVPYTFGGGTRLEIK

SEQ ID NO: 1738 - protein, 11 aa, Artificial Sequence
  Description of Artificial Sequence: Synthetic peptide
QSLVHSNGNTY

SEQ ID NO: 1739 - protein, 3 aa, Artificial Sequence
  Description of Artificial Sequence: Synthetic peptide
RVS

SEQ ID NO: 1740 - protein, 9 aa, Artificial Sequence
  Description of Artificial Sequence: Synthetic peptide
FQGTHVPYT

SEQ ID NO: 1741 - protein, 117 aa, Artificial Sequence
  Description of Artificial Sequence: Synthetic polypeptide
QIQLQQSGPELVRPGASVKISCKASGYTFTDYYIHWVKQRPGEGLEWIGWIYPGSGNTKYNEKFKGKATLTVDTSSSTAYMQLSSLTSEDSAVYFCARGGKFAMDYWGQGTSVTVSS

SEQ ID NO: 1742 - protein, 8 aa, Artificial Sequence
  Description of Artificial Sequence: Synthetic peptide
GYTFTDYY

SEQ ID NO: 1743 - protein, 8 aa, Artificial Sequence
  Description of Artificial Sequence: Synthetic peptide
IYPGSGNT

SEQ ID NO: 1744 - protein, 10 aa, Artificial Sequence
  Description of Artificial Sequence: Synthetic peptide
ARGGKFAMDY

SEQ ID NO: 1745 - protein, 107 aa, Artificial Sequence
  Description of Artificial Sequence: Synthetic polypeptide
DIVMTQSHKFMSTSVGDRVSIICKASQDVGTAVDWYQQKPGQSPKLLIYWASTRHTGVPDRFTGSGSGTDFTLTITNVQSEDLADYFCQQYNSYPLTFGAGTMLDLK

SEQ ID NO: 1746 - protein, 6 aa, Artificial Sequence
  Description of Artificial Sequence: Synthetic peptide
QDVGTA

SEQ ID NO: 1747 - protein, 3 aa, Artificial Sequence
  Description of Artificial Sequence: Synthetic peptide
WAS

SEQ ID NO: 1748 - protein, 15 aa, Artificial Sequence
  Description of Artificial Sequence: Synthetic peptide
QQYNSYPLTFGAGTM

SEQ ID NO: 1749 - protein, 115 aa, Artificial Sequence
  Description of Artificial Sequence: Synthetic polypeptide
EVQLQQSGPELVKPGTSVRISCKTSGYTFTEYTIHWVKQSHGKSLEWIGNINPNNGGTTYNQKFEDKATLTVDKSSSTAYMELRSLTSEDSAVYYCAAGWNFDYWGQGTTLTVSS

SEQ ID NO: 1750 - protein, 8 aa, Artificial Sequence
  Description of Artificial Sequence: Synthetic peptide
GYTFTEYT

SEQ ID NO: 1751 - protein, 8 aa, Artificial Sequence
  Description of Artificial Sequence: Synthetic peptide
INPNNGGT

SEQ ID NO: 1752 - protein, 8 aa, Artificial Sequence
  Description of Artificial Sequence: Synthetic peptide
AAGWNFDY

SEQ ID NO: 1753 - protein, 107 aa, Artificial Sequence
  Description of Artificial Sequence: Synthetic polypeptide
DIQMTQSPSSLSASVGDRVTITCKASQNVDTNVAWYQQKPGQAPKSLIYSASYRYSDVPSRFSGSASGTDFTLTISSVQSEDFATYYCQQYDSYPYTFGGGTKLEIK

SEQ ID NO: 1754 - protein, 6 aa, Artificial Sequence
  Description of Artificial Sequence: Synthetic peptide
QNVDTN

SEQ ID NO: 1755 - protein, 3 aa, Artificial Sequence
  Description of Artificial Sequence: Synthetic peptide
SAS

SEQ ID NO: 1756 - protein, 9 aa, Artificial Sequence
  Description of Artificial Sequence: Synthetic peptide
QQYDSYPYT

SEQ ID NO: 1757 - protein, 121 aa, Artificial Sequence
  Description of Artificial Sequence: Synthetic polypeptide
QVQLVESGGGLVKPGESLRLSCAASGFTFSDYYMYWVRQAPGKGLEWVAIISDGGYYTYYSDIIKGRFTISRDNAKNSLYLQMNSLKAEDTAVYYCARGFPLLRHGAMDYWGQGTLVTVSS

SEQ ID NO: 1758 - protein, 8 aa, Artificial Sequence
  Description of Artificial Sequence: Synthetic peptide
GFTFSDYY

SEQ ID NO: 1759 - protein, 8 aa, Artificial Sequence
  Description of Artificial Sequence: Synthetic peptide
ISDGGYYT

SEQ ID NO: 1760 - protein, 14 aa, Artificial Sequence
  Description of Artificial Sequence: Synthetic peptide
ARGFPLLRHGAMDY

SEQ ID NO: 1761 - protein, 107 aa, Artificial Sequence
  Description of Artificial Sequence: Synthetic polypeptide
DIQMTQSPSSVSASVGDRVTITCRASQGISGWLAWYQQKPGKAPKFLIYAASTLQSGVPSRFSGSGSGTDFTLTISSLQPEDFATYYCQQANSFPPTFGGGTKVEIK

SEQ ID NO: 1762 - protein, 6 aa, Artificial Sequence
  Description of Artificial Sequence: Synthetic peptide
QGISGW

SEQ ID NO: 1763 - protein, 3 aa, Artificial Sequence
  Description of Artificial Sequence: Synthetic peptide
AAS

SEQ ID NO: 1764 - protein, 9 aa, Artificial Sequence
  Description of Artificial Sequence: Synthetic peptide
QQANSFPPT

SEQ ID NO: 1765 - protein, 117 aa, Artificial Sequence
  Description of Artificial Sequence: Synthetic polypeptide
EVQLVESGGGLVQPGGSLRLSCAASGFTFSSYNMNWVRQAPGKGLEWVSYISSSSSTIYYADSVKGRFTISRDNAKNSLSLQMNSLRDEDTAVYYCARAYYYGMDVWGQGTTVTVSS

SEQ ID NO: 1766 - protein, 8 aa, Artificial Sequence
  Description of Artificial Sequence: Synthetic peptide
GFTFSSYN

SEQ ID NO: 1767 - protein, 8 aa, Artificial Sequence
  Description of Artificial Sequence: Synthetic peptide
ISSSSSTI

SEQ ID NO: 1768 - protein, 10 aa, Artificial Sequence
  Description of Artificial Sequence: Synthetic peptide
ARAYYYGMDV

SEQ ID NO: 1769 - protein, 109 aa, Artificial Sequence
  Description of Artificial Sequence: Synthetic polypeptide
QSALTQPRSVSGSPGQSVTISCTGTSSSVGDSIYVSWYQQHPGKAPKLMLYDVTKRPSGVPDRFSGSKSGNTASLTISGLQAEDEADYYCYSYAGTDTLFGGGTKVTVL

SEQ ID NO: 1770 - protein, 9 aa, Artificial Sequence
  Description of Artificial Sequence: Synthetic peptide
SSSVGDSIY

SEQ ID NO: 1771 - protein, 3 aa, Artificial Sequence
  Description of Artificial Sequence: Synthetic peptide
DVT

SEQ ID NO: 1772 - protein, 9 aa, Artificial Sequence
  Description of Artificial Sequence: Synthetic peptide
YSYAGTDTL

SEQ ID NO: 1773 - protein, 120 aa, Artificial Sequence
  Description of Artificial Sequence: Synthetic polypeptide
EVQLVQSGAEVKKPGASVKVSCKASGYTFTSHGISWVRQAPGQGLDWMGWISPYSGNTNYAQKLQGRVTMTTDTSTSTAYMELSSLRSEDTAVYYCARVGSGPYYYMDVWGQGTLVTVSS

SEQ ID NO: 1774 - protein, 8 aa, Artificial Sequence
  Description of Artificial Sequence: Synthetic peptide
GYTFTSHG

SEQ ID NO: 1775 - protein, 8 aa, Artificial Sequence
  Description of Artificial Sequence: Synthetic peptide
ISPYSGNT

SEQ ID NO: 1776 - protein, 13 aa, Artificial Sequence
  Description of Artificial Sequence: Synthetic peptide
ARVGSGPYYYMDV

SEQ ID NO: 1777 - protein, 107 aa, Artificial Sequence
  Description of Artificial Sequence: Synthetic polypeptide
AIRMTQSPSSFSASTGDRVTITCRASQDIRNYVAWYQQKSGKAPKFLIYAASTLQSGVPSRFSGSGSGTDFTLTINSLQSEDFATYYCQQYYNSPPTFGQGTRVEIT

SEQ ID NO: 1778 - protein, 6 aa, Artificial Sequence
  Description of Artificial Sequence: Synthetic peptide
QDIRNY

SEQ ID NO: 1779 - protein, 3 aa, Artificial Sequence
  Description of Artificial Sequence: Synthetic peptide
AAS

SEQ ID NO: 1780 - protein, 9 aa, Artificial Sequence
  Description of Artificial Sequence: Synthetic peptide
QQYYNSPPT

SEQ ID NO: 1781 - protein, 126 aa, Artificial Sequence
  Description of Artificial Sequence: Synthetic polypeptide
QVQLVESGGGVVQPGRSLRLSCTASGFTFKNYAMHWVRQAPAKGLEWVATISYDGRNIQYADSVKGRFTFSRDNSQDTLYLQLNSLRPEDTAVYYCARPVRSRWLQLGLEDAFHIWGQGTMVTVSS

SEQ ID NO: 1782 - protein, 8 aa, Artificial Sequence
  Description of Artificial Sequence: Synthetic peptide
GFTFKNYA

SEQ ID NO: 1783 - protein, 8 aa, Artificial Sequence
  Description of Artificial Sequence: Synthetic peptide
ISYDGRNI

SEQ ID NO: 1784 - protein, 19 aa, Artificial Sequence
  Description of Artificial Sequence: Synthetic peptide
ARPVRSRWLQLGLEDAFHI

SEQ ID NO: 1785 - protein, 111 aa, Artificial Sequence
  Description of Artificial Sequence: Synthetic polypeptide
DIQMTQSPSSLSASVGDRVTITCKASQSVDYDGDSYMNWYQQKPGKAPKLLIYAASNLESGVPSRFSGSGSGTDFTLTISPVQAEDFATYYCQQSNEDPLTFGAGTKLELK

SEQ ID NO: 1786 - protein, 10 aa, Artificial Sequence
  Description of Artificial Sequence: Synthetic peptide
QSVDYDGDSY

SEQ ID NO: 1787 - protein, 3 aa, Artificial Sequence
  Description of Artificial Sequence: Synthetic peptide
AAS

SEQ ID NO: 1788 - protein, 9 aa, Artificial Sequence
  Description of Artificial Sequence: Synthetic peptide
QQSNEDPLT

SEQ ID NO: 1789 - protein, 117 aa, Artificial Sequence
  Description of Artificial Sequence: Synthetic polypeptide
QVQLVQSGAEVKKPGASVKVSCKASGYTFTDYSIHWVRQAPGQGLEWIGYIYPSNGDSGYNQKFKNRVTMTRDTSTSTAYMELSRLRSEDTAVYYCATYFANNFDYWGQGTTLTVSS

SEQ ID NO: 1790 - protein, 8 aa, Artificial Sequence
  Description of Artificial Sequence: Synthetic peptide
GYTFTDYS

SEQ ID NO: 1791 - protein, 8 aa, Artificial Sequence
  Description of Artificial Sequence: Synthetic peptide
IYPSNGDS

SEQ ID NO: 1792 - protein, 11 aa, Artificial Sequence
  Description of Artificial Sequence: Synthetic peptide
ATYFANNFDYW

SEQ ID NO: 1793 - protein, 107 aa, Artificial Sequence
  Description of Artificial Sequence: Synthetic polypeptide
DIQMTQSPSSLSASVGDRVTITCRASENIYSYLAWYQQKPGKAPKLLIHNAKTLAEGVPSRFSGSGSGTDFTLTISSLQPEDFATYYCQHHYGAPLTFGQGTKLEIK

SEQ ID NO: 1794 - protein, 6 aa, Artificial Sequence
  Description of Artificial Sequence: Synthetic peptide
ENIYSY

SEQ ID NO: 1795 - protein, 3 aa, Artificial Sequence
  Description of Artificial Sequence: Synthetic peptide
NAK

SEQ ID NO: 1796 - protein, 9 aa, Artificial Sequence
  Description of Artificial Sequence: Synthetic peptide
QHHYGAPLT

SEQ ID NO: 1797 - protein, 122 aa, Artificial Sequence
  Description of Artificial Sequence: Synthetic polypeptide
QVQLVQSGAEVKKPGSSVKVSCKASGFTFATYNMHWVRQAPGQGLEWMGYIYPGDGNANYNQQFKGRVTITADKSTSTAYMELSSLRSEDTAVYYCARGDFDYDGGYYFDSWGQGTLVTVSS

SEQ ID NO: 1798 - protein, 8 aa, Artificial Sequence
  Description of Artificial Sequence: Synthetic peptide
GFTFATYN

SEQ ID NO: 1799 - protein, 8 aa, Artificial Sequence
  Description of Artificial Sequence: Synthetic peptide
IYPGDGNA

SEQ ID NO: 1800 - protein, 15 aa, Artificial Sequence
  Description of Artificial Sequence: Synthetic peptide
ARGDFDYDGGYYFDS

SEQ ID NO: 1801 - protein, 113 aa, Artificial Sequence
  Description of Artificial Sequence: Synthetic polypeptide
DIQMTQSPSSLSASVGDRVTITCKSSQSLLYRSNQKNYLAWYQQKPGKAPKLLIYWASTRESGVPSRFSGSGSGTDFTLTISSLQPEDFATYYCQQYYNYPRTFGQGTKVEIK

SEQ ID NO: 1802 - protein, 12 aa, Artificial Sequence
  Description of Artificial Sequence: Synthetic peptide
QSLLYRSNQKNY

SEQ ID NO: 1803 - protein, 3 aa, Artificial Sequence
  Description of Artificial Sequence: Synthetic peptide
WAS

SEQ ID NO: 1804 - protein, 9 aa, Artificial Sequence
  Description of Artificial Sequence: Synthetic peptide
QQYYNYPRT

SEQ ID NO: 1805 - protein, 124 aa, Artificial Sequence
  Description of Artificial Sequence: Synthetic polypeptide
EVQLVESGGGLVQPGGSLRLSCAVSGYSITSDYAWNWVRQAPGKGLEWVGYISNSGSTSYNPSLKSRFTISRDTSKNTLYLQMNSLRAEDTAVYYCARERNYDYDDYYYAMDYWGQGTLVTVSS

SEQ ID NO: 1806 - protein, 9 aa, Artificial Sequence
  Description of Artificial Sequence: Synthetic peptide
GYSITSDYA

SEQ ID NO: 1807 - protein, 7 aa, Artificial Sequence
  Description of Artificial Sequence: Synthetic peptide
ISNSGST

SEQ ID NO: 1808 - protein, 17 aa, Artificial Sequence
  Description of Artificial Sequence: Synthetic peptide
ARERNYDYDDYYYAMDY

SEQ ID NO: 1809 - protein, 107 aa, Artificial Sequence
  Description of Artificial Sequence: Synthetic polypeptide
DIQLTQSPSSLSASVGDRVSITCKASQDVSIAVAWYQQKPGKAPKLLIYSASYRYTGVPDRFSGSGSGTDFTLTISSLQPEDFAVYYCQQHYITPLTFGAGTKVEIK

SEQ ID NO: 1810 - protein, 6 aa, Artificial Sequence
  Description of Artificial Sequence: Synthetic peptide
QDVSIA

SEQ ID NO: 1811 - protein, 3 aa, Artificial Sequence
  Description of Artificial Sequence: Synthetic peptide
SAS

SEQ ID NO: 1812 - protein, 9 aa, Artificial Sequence
  Description of Artificial Sequence: Synthetic peptide
QQHYITPLT

SEQ ID NO: 1813 - protein, 121 aa, Artificial Sequence
  Description of Artificial Sequence: Synthetic polypeptide
QVQLQQSGSELKKPGASVKVSCKASGYTFTNYGMNWVKQAPGQGLKWMGWINTYTGEPTYTDDFKGRFAFSLDTSVSTAYLQISSLKADDTAVYFCARGGFGSSYWYFDVWGQGSLVTVSS

SEQ ID NO: 1814 - protein, 8 aa, Artificial Sequence
  Description of Artificial Sequence: Synthetic peptide
GYTFTNYG

SEQ ID NO: 1815 - protein, 8 aa, Artificial Sequence
  Description of Artificial Sequence: Synthetic peptide
INTYTGEP

SEQ ID NO: 1816 - protein, 14 aa, Artificial Sequence
  Description of Artificial Sequence: Synthetic peptide
ARGGFGSSYWYFDV

SEQ ID NO: 1817 - protein, 108 aa, Artificial Sequence
  Description of Artificial Sequence: Synthetic polypeptide
ETVLTQSPGTLSLSPGERATLSCRASQSLGSSYLAWYQQKPGQAPRLLIYGASSRAPGIPDRFSGSGSGTDFTLTISRLEPEDFAVYYCQQYADSPITFGQGTRLEIK

SEQ ID NO: 1818 - protein, 7 aa, Artificial Sequence
  Description of Artificial Sequence: Synthetic peptide
QSLGSSY

SEQ ID NO: 1819 - protein, 3 aa, Artificial Sequence
  Description of Artificial Sequence: Synthetic peptide
GAS

SEQ ID NO: 1820 - protein, 9 aa, Artificial Sequence
  Description of Artificial Sequence: Synthetic peptide
QQYADSPIT

SEQ ID NO: 1821 - protein, 120 aa, Artificial Sequence
  Description of Artificial Sequence: Synthetic polypeptide
QVQLVQSGAEVKKPGSSVKVSCKASGYTFSSNVISWVRQAPGQGLEWMGGVIPIVDIANYAQRFKGRVTITADESTSTTYMELSSLRSEDTAVYYCASTLGLVLDAMDYWGQGTLVTVSS

SEQ ID NO: 1822 - protein, 8 aa, Artificial Sequence
  Description of Artificial Sequence: Synthetic peptide
GYTFSSNV

SEQ ID NO: 1823 - protein, 8 aa, Artificial Sequence
  Description of Artificial Sequence: Synthetic peptide
VIPIVDIA

SEQ ID NO: 1824 - protein, 13 aa, Artificial Sequence
  Description of Artificial Sequence: Synthetic peptide
ASTLGLVLDAMDY

SEQ ID NO: 1825 - protein, 113 aa, Artificial Sequence
  Description of Artificial Sequence: Synthetic polypeptide
DIVMTQSPDSLAVSLGERATINCKSSQTVLYSSNNKKYLAWYQQKPGQPPNLLIYWASTRESGVPDRFSGSGSGTDFTLTISSLQAEDVAVYYCQQYYSTPFTFGPGTKVEIK

SEQ ID NO: 1826 - protein, 12 aa, Artificial Sequence
  Description of Artificial Sequence: Synthetic peptide
QTVLYSSNNKKY

SEQ ID NO: 1827 - protein, 3 aa, Artificial Sequence
  Description of Artificial Sequence: Synthetic peptide
WAS

SEQ ID NO: 1828 - protein, 9 aa, Artificial Sequence
  Description of Artificial Sequence: Synthetic peptide
QQYYSTPFT

SEQ ID NO: 1829 - protein, 126 aa, Artificial Sequence
  Description of Artificial Sequence: Synthetic polypeptide
EVQLQQSGPGLVKPSQTLSLTCAISGDSVSSNSAAWNWIRQSPSRGLEWLGKTYYRFKWYSDYAVSVKGRITINPDTSKNQFSLQLNSVTPEDTAVFYCTRESTTYDLLAGPFDYWGQGTLVTVSS

SEQ ID NO: 1830 - protein, 10 aa, Artificial Sequence
  Description of Artificial Sequence: Synthetic peptide
GDSVSSNSAA

SEQ ID NO: 1831 - protein, 9 aa, Artificial Sequence
  Description of Artificial Sequence: Synthetic peptide
TYYRFKWYS

SEQ ID NO: 1832 - protein, 16 aa, Artificial Sequence
  Description of Artificial Sequence: Synthetic peptide
TRESTTYDLLAGPFDY

SEQ ID NO: 1833 - protein, 111 aa, Artificial Sequence
  Description of Artificial Sequence: Synthetic polypeptide
DIQMTQSPSSLSASVGDRVTITCRASQSVSTSSYSYMHWYQQKPGKAPKLLIKYASNLESGVPSRFSGSGSGTDFTLTISSLQPEDFATYYCQHSWEIPYTFGGGTKVEIK

SEQ ID NO: 1834 - protein, 10 aa, Artificial Sequence
  Description of Artificial Sequence: Synthetic peptide
QSVSTSSYSY

SEQ ID NO: 1835 - protein, 3 aa, Artificial Sequence
  Description of Artificial Sequence: Synthetic peptide
YAS

SEQ ID NO: 1836 - protein, 9 aa, Artificial Sequence
  Description of Artificial Sequence: Synthetic peptide
QHSWEIPYT

SEQ ID NO: 1837 - protein, 119 aa, Artificial Sequence
  Description of Artificial Sequence: Synthetic polypeptide
EVQLVESGGGLVQPGGSLRLSCAASGFTFSSYWMSWVRQAPGKGLEWVAEIRLKSDNYATHYAESVKGRFTISRDDSKNSLYLQMNSLRAEDTAVYYCTGYYADAMDYWGQGTLVTVSS

SEQ ID NO: 1838 - protein, 8 aa, Artificial Sequence
  Description of Artificial Sequence: Synthetic peptide
GFTFSSYW

SEQ ID NO: 1839 - protein, 10 aa, Artificial Sequence
  Description of Artificial Sequence: Synthetic peptide
IRLKSDNYAT

SEQ ID NO: 1840 - protein, 10 aa, Artificial Sequence
  Description of Artificial Sequence: Synthetic peptide
TGYYADAMDY

SEQ ID NO: 1841 - protein, 108 aa, Artificial Sequence
  Description of Artificial Sequence: Synthetic polypeptide
EIVLTQSPATLSLSPGERATLSCRASQSVSSYLAWYQQKPGQAPRLLIYDASNRATGIPARFSGSGSGTDFTLTISSLEPEDFAVYYCQQRSNWLMYTFGQGTKLEIK

SEQ ID NO: 1842 - protein, 6 aa, Artificial Sequence
  Description of Artificial Sequence: Synthetic peptide
QSVSSY

SEQ ID NO: 1843 - protein, 3 aa, Artificial Sequence
  Description of Artificial Sequence: Synthetic peptide
DAS

SEQ ID NO: 1844 - protein, 10 aa, Artificial Sequence
  Description of Artificial Sequence: Synthetic peptide
QQRSNWLMYT

SEQ ID NO: 1845 - protein, 119 aa, Artificial Sequence
  Description of Artificial Sequence: Synthetic polypeptide
QVQLVQSGSELKKPGASVKISCKASGYTFTSYAMNWVRQAPGQGLESMGWINTNTGNPTYAQGFTGRFVFSMDTSVSTAYLQISSLKAEDTAIYYCAPRYSSSWYLDYWGQGTLVTVSS

SEQ ID NO: 1846 - protein, 8 aa, Artificial Sequence
  Description of Artificial Sequence: Synthetic peptide
GYTFTSYA

SEQ ID NO: 1847 - protein, 8 aa, Artificial Sequence
  Description of Artificial Sequence: Synthetic peptide
INTNTGNP

SEQ ID NO: 1848 - protein, 12 aa, Artificial Sequence
  Description of Artificial Sequence: Synthetic peptide
APRYSSSWYLDY

SEQ ID NO: 1849 - protein, 107 aa, Artificial Sequence
  Description of Artificial Sequence: Synthetic polypeptide
DIQMTQSPSSLSASVGDRVTITCRASQDIAGSLNWLQQKPGKAIKRLIYATSSLDSGVPKRFSGSRSGSDYTLTISSLQPEDFATYYCLQYGSFPPTFGQGTKVEIK

SEQ ID NO: 1850 - protein, 6 aa, Artificial Sequence
  Description of Artificial Sequence: Synthetic peptide
QDIAGS

SEQ ID NO: 1851 - protein, 3 aa, Artificial Sequence
  Description of Artificial Sequence: Synthetic peptide
ATS

SEQ ID NO: 1852 - protein, 9 aa, Artificial Sequence
  Description of Artificial Sequence: Synthetic peptide
LQYGSFPPT

SEQ ID NO: 1853 - protein, 117 aa, Artificial Sequence
  Description of Artificial Sequence: Synthetic polypeptide
EVQLVESGGGLVQPGGSLRLSCAASGFTFSSYGMSWVRQAPGKGLEWVATITSGGSYTYYVDSVKGRFTISRDNAKNTLYLQMNSLRAEDTAVYYCVRIGEDALDYWGQGTLVTVSS

SEQ ID NO: 1854 - protein, 8 aa, Artificial Sequence
  Description of Artificial Sequence: Synthetic peptide
GFTFSSYG

SEQ ID NO: 1855 - protein, 8 aa, Artificial Sequence
  Description of Artificial Sequence: Synthetic peptide
ITSGGSYT

SEQ ID NO: 1856 - protein, 10 aa, Artificial Sequence
  Description of Artificial Sequence: Synthetic peptide
VRIGEDALDY

SEQ ID NO: 1857 - protein, 107 aa, Artificial Sequence [sequence omitted]

SEQ ID NO: 1858 - protein, 6 aa, Artificial Sequence
  Description of Artificial Sequence: Synthetic peptide
QGIDNW

SEQ ID NO: 1859 - protein, 3 aa, Artificial Sequence
  Description of Artificial Sequence: Synthetic peptide
DAS

SEQ ID NO: 1860 - protein, 9 aa, Artificial Sequence
  Description of Artificial Sequence: Synthetic peptide
QQAKAFPPT

SEQ ID NO: 1861 - protein, 116 aa, Artificial Sequence [sequence omitted]

SEQ ID NO: 1862 - protein, 8 aa, Artificial Sequence
  Description of Artificial Sequence: Synthetic peptide
GFTFSSYS

SEQ ID NO: 1863 - protein, 8 aa, Artificial Sequence
  Description of Artificial Sequence: Synthetic peptide
ISSSSSYI

SEQ ID NO: 1864 - protein, 9 aa, Artificial Sequence
  Description of Artificial Sequence: Synthetic peptide
ARVTDAFDI

SEQ ID NO: 1865 - protein, 107 aa, Artificial Sequence
  Description of Artificial Sequence: Synthetic polypeptide
DIQMTQSPSSLSASVGDRVTITCRASQSIDTRLNWYQQKPGKAPKLLIYSASSLQSGVPSRFSGSGSGTDFTLTISSLQPEDFATYYCQQSAYNPITFGQGTKVEIK

SEQ ID NO: 1866 - protein, 6 aa, Artificial Sequence
  Description of Artificial Sequence: Synthetic peptide
QSIDTR

SEQ ID NO: 1867 - protein, 3 aa, Artificial Sequence
  Description of Artificial Sequence: Synthetic peptide
SAS

SEQ ID NO: 1868 - protein, 9 aa, Artificial Sequence
  Description of Artificial Sequence: Synthetic peptide
QQSAYNPIT

SEQ ID NO: 1869 - protein, 120 aa, Artificial Sequence
  Description of Artificial Sequence: Synthetic polypeptide
QVQLVQSGAEVKKPGSSVKVSCKASGGTFSSYAISWVRQAPGQGLEWMGGIIPIFGTANYAQKFQGRVTITADESTSTAYMELSSLRSEDTAVYYCARSSYGWSYEFDYWGQGTLVTVSS

SEQ ID NO: 1870 - protein, 8 aa, Artificial Sequence
  Description of Artificial Sequence: Synthetic peptide
GGTFSSYA

SEQ ID NO: 1871 - protein, 8 aa, Artificial Sequence
  Description of Artificial Sequence: Synthetic peptide
IIPIFGTA

SEQ ID NO: 1872 - protein, 13 aa, Artificial Sequence
  Description of Artificial Sequence: Synthetic peptide
ARSSYGWSYEFDY

SEQ ID NO: 1873 - protein, 113 aa, Artificial Sequence
  Description of Artificial Sequence: Synthetic polypeptide
DIVMSQSPSSLAVSVGEKVTMSCKSSQSLLYSSNQKNYLAWYQQKPGQSPKLLIYWASTRESGVPDRFTGSGSGTDFTLTISSVKAEDLALYYCQQYHSYPFTFGSGTKLEIK

SEQ ID NO: 1874 - protein, 12 aa, Artificial Sequence
  Description of Artificial Sequence: Synthetic peptide
QSLLYSSNQKNY

SEQ ID NO: 1875 - protein, 3 aa, Artificial Sequence
  Description of Artificial Sequence: Synthetic peptide
WAS

SEQ ID NO: 1876 - protein, 9 aa, Artificial Sequence
  Description of Artificial Sequence: Synthetic peptide
QQYHSYPFT

SEQ ID NO: 1877 - protein, 118 aa, Artificial Sequence
  Description of Artificial Sequence: Synthetic polypeptide
QVQLQQPGDELVKPGASVKLSCKASGYTFTSYWMQWVKQRPGQGLEWIGEINPSNGRTNYNEMFKSKATLTVDKSSSTAYMQLSSLTSEDSAVYYCALYDGYYAMDYWGQGTSVTVSS

SEQ ID NO: 1878 - protein, 8 aa, Artificial Sequence
  Description of Artificial Sequence: Synthetic peptide
GYTFTSYW

SEQ ID NO: 1879 - protein, 8 aa, Artificial Sequence
  Description of Artificial Sequence: Synthetic peptide
INPSNGRT

SEQ ID NO: 1880 - protein, 11 aa, Artificial Sequence
  Description of Artificial Sequence: Synthetic peptide
ALYDGYYAMDY

SEQ ID NO: 1881 - protein, 107 aa, Artificial Sequence
  Description of Artificial Sequence: Synthetic polypeptide
DIQMTQSSSSFSVSLGDRVTITCKANEDINNRLAWYQQTPGNSPRLLISGATNLVTGVPSRFSGSGSGKDYTLTITSLQAEDFATYYCQQYWSTPFTFGSGTELEIK

SEQ ID NO: 1882 - protein, 6 aa, Artificial Sequence
  Description of Artificial Sequence: Synthetic peptide
EDINNR

SEQ ID NO: 1883 - protein, 3 aa, Artificial Sequence
  Description of Artificial Sequence: Synthetic peptide
GAT

SEQ ID NO: 1884 - protein, 9 aa, Artificial Sequence
  Description of Artificial Sequence: Synthetic peptide
QQYWSTPFT

SEQ ID NO: 1885 - protein, 120 aa, Artificial Sequence
  Description of Artificial Sequence: Synthetic polypeptide
QVQLQQPGAELVKPGASVKLSCKASGYTFTGYWMHWVKQRPGHGLEWIGEINPSNGRTNYNERFKSKATLTVDKSSTTAFMQLSGLTSEDSAVYFCARDYYGTSYNFDYWGQGTTLTVSS

SEQ ID NO: 1886 - protein, 8 aa, Artificial Sequence
  Description of Artificial Sequence: Synthetic peptide
GYTFTGYW

SEQ ID NO: 1887 - protein, 8 aa, Artificial Sequence
  Description of Artificial Sequence: Synthetic peptide
INPSNGRT

SEQ ID NO: 1888 - protein, 13 aa, Artificial Sequence
  Description of Artificial Sequence: Synthetic peptide
ARDYYGTSYNFDY

SEQ ID NO: 1889 - protein, 104 aa, Artificial Sequence
  Description of Artificial Sequence: Synthetic polypeptide
EIVLTQSPAIMSASPGERVTMTCSASSGVNYMHWYQQKPGTSPRRWIYDTSKLASGVPARFSGSGSGTSYSLTISSMEPEDAATYYCHQRGSYTFGGGTKLEIK

SEQ ID NO: 1890 - protein, 5 aa, Artificial Sequence
  Description of Artificial Sequence: Synthetic peptide
SGVNY

SEQ ID NO: 1891 - protein, 3 aa, Artificial Sequence
  Description of Artificial Sequence: Synthetic peptide
DTS

SEQ ID NO: 1892 - protein, 7 aa, Artificial Sequence
  Description of Artificial Sequence: Synthetic peptide
HQRGSYT

SEQ ID NO: 1893 - protein, 120 aa, Artificial Sequence; identical to SEQ ID NO: 317
  Description of Artificial Sequence: Synthetic polypeptide

SEQ ID NO: 1894 - protein, 8 aa, Artificial Sequence
  Description of Artificial Sequence: Synthetic peptide
GYTFTSNW

SEQ ID NO: 1895 - protein, 8 aa, Artificial Sequence
  Description of Artificial Sequence: Synthetic peptide
IDPSDSYT

SEQ ID NO: 1896 - protein, 13 aa, Artificial Sequence
  Description of Artificial Sequence: Synthetic peptide
ARGSNPYYYAMDY

SEQ ID NO: 1897 - protein, 107 aa, Artificial Sequence
  Description of Artificial Sequence: Synthetic polypeptide
DIQMTQSPSSLSASVGDRVTITCHASQNIYVWLNWYQQKPGKAPKLLIYKASNLHTGVPSRFSGSGSGTDFTLTISSLQPEDFATYYCQQGQTYPYTFGGGTKVEIK

SEQ ID NO: 1898 - protein, 6 aa, Artificial Sequence
  Description of Artificial Sequence: Synthetic peptide
QNIYVW

SEQ ID NO: 1899 - protein, 3 aa, Artificial Sequence
  Description of Artificial Sequence: Synthetic peptide
KAS

SEQ ID NO: 1900 - protein, 9 aa, Artificial Sequence
  Description of Artificial Sequence: Synthetic peptide
QQGQTYPYT

SEQ ID NO: 1901 - protein, 120 aa, Artificial Sequence
  Description of Artificial Sequence: Synthetic polypeptide
QVQLVQSGAEVKKPGASVKVSCKASGYTFTSYYIHWVRQAPGQGLEWIGCIYPGNVNTNYNEKFKDRATLTVDTSISTAYMELSRLRSDDTAVYFCTRSHYGLDWNFDVWGQGTTVTVSS

SEQ ID NO: 1902 - protein, 8 aa, Artificial Sequence
  Description of Artificial Sequence: Synthetic peptide
GYTFTSYY

SEQ ID NO: 1903 - protein, 8 aa, Artificial Sequence
  Description of Artificial Sequence: Synthetic peptide
IYPGNVNT

SEQ ID NO: 1904 - protein, 13 aa, Artificial Sequence
  Description of Artificial Sequence: Synthetic peptide
TRSHYGLDWNFDV

SEQ ID NO: 1905 - protein, 108 aa, Artificial Sequence
  Description of Artificial Sequence: Synthetic polypeptide
DIQMTQSPSSLSASLGGKVTIACKASQDINNYIAWYQHKPGKGPRLLIYHTSTLQPGIPSRFSGSGSGRDYSFSISNLEPEDIATYYCIQYNDLFLTTFGGGTKLEIK

SEQ ID NO: 1906 - protein, 6 aa, Artificial Sequence
  Description of Artificial Sequence: Synthetic peptide
QDINNY

SEQ ID NO: 1907 - protein, 3 aa, Artificial Sequence
  Description of Artificial Sequence: Synthetic peptide
HTS

SEQ ID NO: 1908 - protein, 10 aa, Artificial Sequence
  Description of Artificial Sequence: Synthetic peptide
IQYNDLFLTT

SEQ ID NO: 1909 - protein, 120 aa, Artificial Sequence
  Description of Artificial Sequence: Synthetic polypeptide
EVILVESGGAIVEPGGSLKLSCSASGFTFSNYAMSWVRQTPEKRLEWVAAISDHSTNTYYPDSVKGRFTISRDNAKNTLYLQMNSLRSEDTAIYYCARKYGGDYDPEDYWGQGTTLTVSS

SEQ ID NO: 1910 - protein, 8 aa, Artificial Sequence
  Description of Artificial Sequence: Synthetic peptide
GFTFSNYA

SEQ ID NO: 1911 - protein, 8 aa, Artificial Sequence
  Description of Artificial Sequence: Synthetic peptide
ISDHSTNT

SEQ ID NO: 1912 - protein, 13 aa, Artificial Sequence
  Description of Artificial Sequence: Synthetic peptide
ARKYGGDYDPEDY

SEQ ID NO: 1913 - protein, 112 aa, Artificial Sequence
  Description of Artificial Sequence: Synthetic polypeptide
DVLMTQTPLSLPVSLGDQASISCRSSQSIVYSNGNTYLGWYLQKPGQSPKLLIYKVSNRFSGVPDRFSGSGSGTDFTLKISRVEAEDLGVYHCFQGSHVPYTFGGGTKVEIK

SEQ ID NO: 1914 - protein, 11 aa, Artificial Sequence
  Description of Artificial Sequence: Synthetic peptide
QSIVYSNGNTY

SEQ ID NO: 1915 - protein, 3 aa, Artificial Sequence
  Description of Artificial Sequence: Synthetic peptide
KVS

SEQ ID NO: 1916 - protein, 9 aa, Artificial Sequence
  Description of Artificial Sequence: Synthetic peptide
FQGSHVPYT

SEQ ID NO: 1917 - protein, 117 aa, Artificial Sequence
  Description of Artificial Sequence: Synthetic polypeptide
QVQLQQPGAELVKPGASVMMSCKASGYTFTNYNMHWVKQTPGQGLEWIGTIYPGNDDTSYNQKFKDKATLTADKSSSAAYMQLSSLTSEDSAVYYCARGGYRAMDYWGQGTSVTVSS

SEQ ID NO: 1918 - protein, 8 aa, Artificial Sequence
  Description of Artificial Sequence: Synthetic peptide
GYTFTNYN

SEQ ID NO: 1919 - protein, 8 aa, Artificial Sequence
  Description of Artificial Sequence: Synthetic peptide
IYPGNDDT

SEQ ID NO: 1920 - protein, 10 aa, Artificial Sequence
  Description of Artificial Sequence: Synthetic peptide
ARGGYRAMDY

SEQ ID NO: 1921 - protein, 106 aa, Artificial Sequence
  Description of Artificial Sequence: Synthetic polypeptide
DVQINQSPSFLAASPGETITNCRTSRSISQYLAWYQEKPGKTNKLLIYSGSTLQSGIPSRFSGSGSGTDFTLTISGLEPEDFAMYYCQQHNENPLTFGAGTKLELK

SEQ ID NO: 1922 - protein, 6 aa, Artificial Sequence
  Description of Artificial Sequence: Synthetic peptide
RSISQY

SEQ ID NO: 1923 - protein, 3 aa, Artificial Sequence
  Description of Artificial Sequence: Synthetic peptide
SGS

SEQ ID NO: 1924 - protein, 9 aa, Artificial Sequence
  Description of Artificial Sequence: Synthetic peptide
QQHNENPLT

SEQ ID NO: 1925 - protein, 118 aa, Artificial Sequence
  Description of Artificial Sequence: Synthetic polypeptide
QVQLQQSGAELVKPGASVKLSCTASGFNIKDTYIHFVRQRPEQGLEWIGRIDPANDNTLYASKFQGKATITADTSSNTAYMHLCSLTSGDTAVYYCGRGYGYYVFDHWGQGTTLTVSS

SEQ ID NO: 1926 - protein, 8 aa, Artificial Sequence
  Description of Artificial Sequence: Synthetic peptide
GFNIKDTY

SEQ ID NO: 1927 - protein, 8 aa, Artificial Sequence
  Description of Artificial Sequence: Synthetic peptide
IDPANDNT

SEQ ID NO: 1928 - protein, 11 aa, Artificial Sequence
  Description of Artificial Sequence: Synthetic peptide
GRGYGYYVFDH

SEQ ID NO: 1929 - protein, 107 aa, Artificial Sequence; identical to SEQ ID NO: 1537
  Description of Artificial Sequence: Synthetic polypeptide

SEQ ID NO: 1930 - protein, 6 aa, Artificial Sequence
  Description of Artificial Sequence: Synthetic peptide
QSVSSY

SEQ ID NO: 1931 - protein, 3 aa, Artificial Sequence
  Description of Artificial Sequence: Synthetic peptide
DAS

SEQ ID NO: 1932 - protein, 9 aa, Artificial Sequence
  Description of Artificial Sequence: Synthetic peptide
QQRSNWMYT

SEQ ID NO: 1933 - protein, 123 aa, Artificial Sequence; identical to SEQ ID NO: 1541
  Description of Artificial Sequence: Synthetic polypeptide

SEQ ID NO: 1934 - protein, 8 aa, Artificial Sequence
  Description of Artificial Sequence: Synthetic peptide
GGTFSFYA

SEQ ID NO: 1935 - protein, 8 aa, Artificial Sequence
  Description of Artificial Sequence: Synthetic peptide
FIPIFGAA

SEQ ID NO: 1936 - protein, 16 aa, Artificial Sequence
  Description of Artificial Sequence: Synthetic peptide
ARIPSGSYYYDYDMDV

SEQ ID NO: 1937 - protein, 109 aa, Artificial Sequence
  Description of Artificial Sequence: Synthetic polypeptide
QSELTQPRSVSGSPGQSVTISCTGTSRDVGGYNYVSWYQQHPGKAPKLIIHDVIERSSGVPDRFSGSKSGNTASLTISGLQAEDEADYYCWSFAGSYYVFGTGTDVTVL

SEQ ID NO: 1938 - protein, 9 aa, Artificial Sequence
  Description of Artificial Sequence: Synthetic peptide
SRDVGGYNY

SEQ ID NO: 1939 - protein, 3 aa, Artificial Sequence
  Description of Artificial Sequence: Synthetic peptide
DVI

SEQ ID NO: 1940 - protein, 9 aa, Artificial Sequence
  Description of Artificial Sequence: Synthetic peptide
WSFAGSYYV

SEQ ID NO: 1941 - protein, 119 aa, Artificial Sequence
  Description of Artificial Sequence: Synthetic polypeptide
EVQLLESGGGLVQPGGSLRLSCAASGFTFSTYQMSWVRQAPGKGLEWVSGIVSSGGSTAYADSVKGRFTISRDNSKNTLYLQMNSLRAEDTAVYYCAGELLPYYGMDVWGQGTTVTVSS

SEQ ID NO: 1942 - protein, 8 aa, Artificial Sequence
  Description of Artificial Sequence: Synthetic peptide
GFTFSTYQ

SEQ ID NO: 1943 - protein, 8 aa, Artificial Sequence
  Description of Artificial Sequence: Synthetic peptide
IVSSGGST

SEQ ID NO: 1944 - protein, 12 aa, Artificial Sequence
  Description of Artificial Sequence: Synthetic peptide
AGELLPYYGMDV

SEQ ID NO: 1945 - protein, 111 aa, Artificial Sequence
  Description of Artificial Sequence: Synthetic polypeptide
QSVLTQPPSVSGAPGQRVTISCTGSSSNIGAGYDVHWYQQLPGTAPKLLIYGNSNRPSGVPDRFSGSKSGTSASLAITGLQAEDEADYYCQSYDNSLSSWVFGGGTKLTVL

SEQ ID NO: 1946 - protein, 9 aa, Artificial Sequence
  Description of Artificial Sequence: Synthetic peptide
SSNIGAGYD

SEQ ID NO: 1947 - protein, 3 aa, Artificial Sequence
  Description of Artificial Sequence: Synthetic peptide
GNS

SEQ ID NO: 1948 - protein, 11 aa, Artificial Sequence
  Description of Artificial Sequence: Synthetic peptide
QSYDNSLSSWV

SEQ ID NO: 1949 - protein, 119 aa, Artificial Sequence
  Description of Artificial Sequence: Synthetic polypeptide
EVQLQQSGAEVKKPGSSVKVSCKASGGTFSSYAISWVRQAPGQGLEWMGRIIPILGIANYAQKFQGRVTITADKSTSAYMELSSLRSEDTAVYYCARDVGSGSYSLDYWGQGTLVTVSS

SEQ ID NO: 1950 - protein, 8 aa, Artificial Sequence
  Description of Artificial Sequence: Synthetic peptide
GGTFSSYA

SEQ ID NO: 1951 - protein, 8 aa, Artificial Sequence
  Description of Artificial Sequence: Synthetic peptide
IIPILGIA

SEQ ID NO: 1952 - protein, 13 aa, Artificial Sequence
  Description of Artificial Sequence: Synthetic peptide
ARDVGSGSYSLDY

SEQ ID NO: 1953 - protein, 108 aa, Artificial Sequence
  Description of Artificial Sequence: Synthetic polypeptide
SYVLTQPPSVSVAPGQTARITCGGNNIGSRSVHWYQQKPGQAPVLVVYDDSDRPSGIPERFSGSNSGNMATLTISRVEAGDEADYYCQVWDSRTDHWVFGGGTDLTVL

SEQ ID NO: 1954 - protein, 6 aa, Artificial Sequence
  Description of Artificial Sequence: Synthetic peptide
NIGSRS

SEQ ID NO: 1955 - protein, 3 aa, Artificial Sequence
  Description of Artificial Sequence: Synthetic peptide
DDS

SEQ ID NO: 1956 - protein, 11 aa, Artificial Sequence
  Description of Artificial Sequence: Synthetic peptide
QVWDSRTDHWV

SEQ ID NO: 1957 - protein, 122 aa, Artificial Sequence
  Description of Artificial Sequence: Synthetic polypeptide
EVQLVESGGGLVQPGRSLRLSCAASGFTFDDYAMHWVRQAPGKGLEWVSGISWNSGSIGYADSVKGRFTISRDNAKNSLYLQMNSLRAEDTAVYYCARGRGFHYYYYGMDIWGQGTTVTVSS

SEQ ID NO: 1958 - protein, 8 aa, Artificial Sequence
  Description of Artificial Sequence: Synthetic peptide
GFTFDDYA

SEQ ID NO: 1959 - protein, 8 aa, Artificial Sequence
  Description of Artificial Sequence: Synthetic peptide
ISWNSGSI

SEQ ID NO: 1960 - protein, 15 aa, Artificial Sequence
  Description of Artificial Sequence: Synthetic peptide
ARGRGFHYYYYGMDI

SEQ ID NO: 1961 - protein, 112 aa, Artificial Sequence
  Description of Artificial Sequence: Synthetic polypeptide
EVILTQSPLSLPVTPGEPASISCRSSQSLLHSIGYNYLDWYLQKPGQSPQLLIYLGSNRASGVPDRFSGSGSGTDFTLKISRVEAEDVGVYYCMQALQTPLTFGGGTKVEIK

SEQ ID NO: 1962 - protein, 10 aa, Artificial Sequence
  Description of Artificial Sequence: Synthetic peptide
QSLLHSIGYN

SEQ ID NO: 1963 - protein, 3 aa, Artificial Sequence
  Description of Artificial Sequence: Synthetic peptide
LGS

SEQ ID NO: 1964 - protein, 9 aa, Artificial Sequence
  Description of Artificial Sequence: Synthetic peptide
MQALQTPLT

SEQ ID NO: 1965 - protein, 120 aa, Artificial Sequence
  Description of Artificial Sequence: Synthetic polypeptide
EVQLVESGGGVVQPGRSLRLSCAASGFTFRSYGMHWVRQAPGKGLEWVAVISYDGSNKYYTDSVNGRFTISRDNSKNTLYQMNSLRAEDTAVYYCARGGGYYETSGPDYWGQGTLVTVSS

SEQ ID NO: 1966 - protein, 8 aa, Artificial Sequence
  Description of Artificial Sequence: Synthetic peptide
GFTFRSYG

SEQ ID NO: 1967 - protein, 8 aa, Artificial Sequence
  Description of Artificial Sequence: Synthetic peptide
ISYDGSNK

SEQ ID NO: 1968 - protein, 14 aa, Artificial Sequence
  Description of Artificial Sequence: Synthetic peptide
ARGGGYYETSGPDY

SEQ ID NO: 1969 - protein, 109 aa, Artificial Sequence
  Description of Artificial Sequence: Synthetic polypeptide
DVVMTQSPLSPVTPGEPASISCRSSQSLLHSNGHNYLDWYLQKPGQSQLLIYLGSNRSGVPDRFSGSGSGTDFTLKISRVEAEDVGVYYCMQTLQTPLTFGPGTKVDIK

SEQ ID NO: 1970 - protein, 11 aa, Artificial Sequence
  Description of Artificial Sequence: Synthetic peptide
QSLLHSNGHNY

SEQ ID NO: 1971 - protein, 3 aa, Artificial Sequence
  Description of Artificial Sequence: Synthetic peptide
LGS

SEQ ID NO: 1972 - protein, 9 aa, Artificial Sequence
  Description of Artificial Sequence: Synthetic peptide
MQTLQTPLT

SEQ ID NO: 1973 - protein, 120 aa, Artificial Sequence
  Description of Artificial Sequence: Synthetic polypeptide
EVQLVETGGGVVQPGRSLRLSCAASGFTFSSYGMHWVRQAPGKGLEWVAVISYDGSNKYYADSVKGRFTISDNSKNTLYLQMNSLRAEDTAVYYCAKDRYGWGSSFGHDYWGQGTLTVSS

SEQ ID NO: 1974 - protein, 8 aa, Artificial Sequence
  Description of Artificial Sequence: Synthetic peptide
GFTFSSYG

SEQ ID NO: 1975 - protein, 8 aa, Artificial Sequence
  Description of Artificial Sequence: Synthetic peptide
ISYDGSNK

SEQ ID NO: 1976 - protein, 15 aa, Artificial Sequence
  Description of Artificial Sequence: Synthetic peptide
AKDRYGWGSSFGHDY

SEQ ID NO: 1977 - protein, 110 aa, Artificial Sequence
  Description of Artificial Sequence: Synthetic polypeptide
QSVLTQPPSVSAAPGQTVTISCSGSSSNIGRNYVSWFQQVPGRAPKLLIYDNNQRPSGIPGRFSASKSDTSATLDITGLQSGDEAVYYCGTWDSTLDLYVFGGGTHVPVL

SEQ ID NO: 1978 - protein, 8 aa, Artificial Sequence
  Description of Artificial Sequence: Synthetic peptide
SSNIGRNY

SEQ ID NO: 1979 - protein, 3 aa, Artificial Sequence
  Description of Artificial Sequence: Synthetic peptide
DNN

SEQ ID NO: 1980 - protein, 11 aa, Artificial Sequence
  Description of Artificial Sequence: Synthetic peptide
GTWDSTLDLYV

SEQ ID NO: 1981 - protein, 128 aa, Artificial Sequence
  Description of Artificial Sequence: Synthetic polypeptide
EVQLVQSGAEVKKPGASVKVSCKASGYTFTSYYIHWVRQAPGQGLEWMGAINPSGGSTPYAQKFQGRVTMTRDTSTSTVYMELSSLRSEDTAVYYCARDGTYGSGSYPYYYYYGMDVWGQGTTVTVSS

SEQ ID NO: 1982 - protein, 8 aa, Artificial Sequence
  Description of Artificial Sequence: Synthetic peptide
GYTFTSYY

SEQ ID NO: 1983 - protein, 8 aa, Artificial Sequence
  Description of Artificial Sequence: Synthetic peptide
INPSGGST

SEQ ID NO: 1984 - protein, 21 aa, Artificial Sequence
  Description of Artificial Sequence: Synthetic peptide
ARDGTYGSGSYPYYYYYGMDV

SEQ ID NO: 1985 - protein, 111 aa, Artificial Sequence
  Description of Artificial Sequence: Synthetic polypeptide
ETTLTQSPGTLSLSLSPGERATLSCRASQSVSSSYLAWYQQKPGQAPRLLIYGASSRATGIPDRFSGSGSGTDFTLTISRLEPEDFAVYYCQQYGSSPRTFGQQGTKVEIK

SEQ ID NO: 1986 - protein, 7 aa, Artificial Sequence
  Description of Artificial Sequence: Synthetic peptide
ASQSVSS

SEQ ID NO: 1987 - protein, 4 aa, Artificial Sequence
  Description of Artificial Sequence: Synthetic peptide
IYGA

SEQ ID NO: 1988 - protein, 11 aa, Artificial Sequence
  Description of Artificial Sequence: Synthetic peptide
YCQQYGSSPRT

SEQ ID NO: 1989 - protein, 123 aa, Artificial Sequence
  Description of Artificial Sequence: Synthetic polypeptide
EVQLVQSGAEVKKPGSSVKVSCKASGGTFSSYAISWVRQAPGQGLEWMGGIIPIFGTANYAQKFQGRVTITADESTSTAYMELSSLRSEDTAVYYCARGPEYCINGVCSLDVWGQGTTVTVSS

SEQ ID NO: 1990 - protein, 8 aa, Artificial Sequence
  Description of Artificial Sequence: Synthetic peptide
GGTFSSYA

SEQ ID NO: 1991 - protein, 8 aa, Artificial Sequence
  Description of Artificial Sequence: Synthetic peptide
IIPIFGTA

SEQ ID NO: 1992 - protein, 16 aa, Artificial Sequence
  Description of Artificial Sequence: Synthetic peptide
ARGPEYCINGVCSLDV

SEQ ID NO: 1993 - protein, 107 aa, Artificial Sequence
  Description of Artificial Sequence: Synthetic polypeptide
EIVMTQSPATLSLSPGERATLSCRASQSVSSYLAWYQQKPGQAPRLLIYDASNRATGIPARFSGSGSGTDFTLTISSLEPEDFAVYYCHQYGSSPQTFGQGTKVEIK

SEQ ID NO: 1994 - protein, 6 aa, Artificial Sequence
  Description of Artificial Sequence: Synthetic peptide
QSVSSY

SEQ ID NO: 1995 - protein, 3 aa, Artificial Sequence
  Description of Artificial Sequence: Synthetic peptide
DAS

SEQ ID NO: 1996 - protein, 9 aa, Artificial Sequence
  Description of Artificial Sequence: Synthetic peptide
HQYGSSPQT

SEQ ID NO: 1997 - protein, 121 aa, Artificial Sequence
  Description of Artificial Sequence: Synthetic polypeptide
EVQLVQSGAEVKKPGSSVKVSCKASGGTFSSYAISWVRQAPGQGLEWMGGIIPIFGTANYAQKFQGRVTITADESTSTAYMELSSLRSEDTAVYYCAVHYGDYVFSSMDVWGQGTTVTVSS

SEQ ID NO: 1998 - protein, 8 aa, Artificial Sequence
  Description of Artificial Sequence: Synthetic peptide
GGTFSSYA

SEQ ID NO: 1999 - protein, 8 aa, Artificial Sequence
  Description of Artificial Sequence: Synthetic peptide
IIPIFGTA

SEQ ID NO: 2000 - protein, 14 aa, Artificial Sequence
  Description of Artificial Sequence: Synthetic peptide
AVHYGDYVFSSMDV

SEQ ID NO: 2001 - protein, 109 aa, Artificial Sequence
  Description of Artificial Sequence: Synthetic polypeptide
  MOD_RES (42)..(42): Any amino acid
EIVLTQSPATLSLSPGERATLSCRASQSVGSYLAWYQQKPGXAPRLLIYDASHRATGIPARFSGSGSGTDFTLTISSLEPEDFAVYYCQQRSNWPPMYTFGQGTKLEIK

SEQ ID NO: 2002 - protein, 6 aa, Artificial Sequence
  Description of Artificial Sequence: Synthetic peptide
QSVGSY

SEQ ID NO: 2003 - protein, 3 aa, Artificial Sequence
  Description of Artificial Sequence: Synthetic peptide
DAS

SEQ ID NO: 2004 - protein, 11 aa, Artificial Sequence
  Description of Artificial Sequence: Synthetic peptide
QQRSNWPPMYT

SEQ ID NO: 2005 - protein, 124 aa, Artificial Sequence
  Description of Artificial Sequence: Synthetic polypeptide
EVQLVQSGAEVKKPGSSVKVSCKASGGTFSSYTISWVRQAPGQGLEWMGGIIPIFGTANYAQKFQGRVTITADKSTSTSTAYMELSSLRSEDTAVYYCAGDTDSSGYYGAVDYWGQGTLVTVSS

SEQ ID NO: 2006 - protein, 8 aa, Artificial Sequence
  Description of Artificial Sequence: Synthetic peptide
GGTFSSYT

SEQ ID NO: 2007 - protein, 8 aa, Artificial Sequence
  Description of Artificial Sequence: Synthetic peptide
IIPIFGTA

SEQ ID NO: 2008 - protein, 17 aa, Artificial Sequence
  Description of Artificial Sequence: Synthetic peptide
YCAGDTDSSGYYGAVDY

SEQ ID NO: 2009 - protein, 110 aa, Artificial Sequence
  Description of Artificial Sequence: Synthetic polypeptide
NFMLTQPHSVSESPGKTVTISCTGSGGSIDNNYVHWYQQRPGSAPTTVMFEDNQRPSGVPDRFSGSIDSSSNSASLVISGLKTEDEGDYYCQSSDGSKVVFGGGTKLTVL

SEQ ID NO: 2010 - protein, 8 aa, Artificial Sequence
  Description of Artificial Sequence: Synthetic peptide
GGSIDNNY

SEQ ID NO: 2011 - protein, 3 aa, Artificial Sequence
  Description of Artificial Sequence: Synthetic peptide
EDN

SEQ ID NO: 2012 - protein, 9 aa, Artificial Sequence
  Description of Artificial Sequence: Synthetic peptide
QSSDGSKVV

SEQ ID NO: 2013 - protein, 123 aa, Artificial Sequence
  Description of Artificial Sequence: Synthetic polypeptide
EVQLVQSGGGVVQPGRSLTLSCAASGFTFSSYGMHWVRQAPGKGLEWVSVISYDGSNKYYADSVKGRFTISRDNSKNTLYLMNSLRTEDTAVYYCAKTLSAGEWIGGGAFDIWGHGTMVTVSS

SEQ ID NO: 2014 - protein, 8 aa, Artificial Sequence
  Description of Artificial Sequence: Synthetic peptide
GFTFSSYG

SEQ ID NO: 2015 - protein, 8 aa, Artificial Sequence
  Description of Artificial Sequence: Synthetic peptide
ISYDGSNK

SEQ ID NO: 2016 - protein, 17 aa, Artificial Sequence
  Description of Artificial Sequence: Synthetic peptide
AKTLSAGEWIGGGAFDI

SEQ ID NO: 2017 - protein, 112 aa, Artificial Sequence
  Description of Artificial Sequence: Synthetic polypeptide
DIVMTQSPDSLAVSLGERVTINCKSSQSLLYTSNNRNYLAWYQLKPGQPPKLLIYWASTRESGVPDRFSGSGSGTDFTLTISGLQAEDVAVYYCQQYYKSPLFGQGTKLEIK

SEQ ID NO: 2018 - protein, 12 aa, Artificial Sequence
  Description of Artificial Sequence: Synthetic peptide
QSLLYTSNNRNY

SEQ ID NO: 2019 - protein, 3 aa, Artificial Sequence
  Description of Artificial Sequence: Synthetic peptide
WAS

SEQ ID NO: 2020 - protein, 8 aa, Artificial Sequence
  Description of Artificial Sequence: Synthetic peptide
QQYYKSPL

SEQ ID NO: 2021 - protein, 123 aa, Artificial Sequence
  Description of Artificial Sequence: Synthetic polypeptide
QVQLQESGPGLVKPSQTLALTCSVIGGSISSGDYYWSWIRQPPGKGLEWVGYISDSGSTYNEPSLNSRVTISVDTSKNQFSLKLFSMTAADTAVYYCARVRIQGASWGFFDLWGRGTLVSVSS

SEQ ID NO: 2022 - protein, 10 aa, Artificial Sequence
  Description of Artificial Sequence: Synthetic peptide
GGSISSGDYY

SEQ ID NO: 2023 - protein, 7 aa, Artificial Sequence
  Description of Artificial Sequence: Synthetic peptide
ISDSGST

SEQ ID NO: 2024 - protein, 15 aa, Artificial Sequence
  Description of Artificial Sequence: Synthetic peptide
ARVRIQGASWGFFDL

SEQ ID NO: 2025 - protein, 107 aa, Artificial Sequence
  Description of Artificial Sequence: Synthetic polypeptide
EIVMTQSPATLSVSPGERATLSCRASQSFSDDLAWYQQKPGQAPRLLIYAASTRATGIPARFSGRGSGTEFTLTISSLQSEDSAVYYCQQYNNWPQTFGQGTKVEIK

SEQ ID NO: 2026 - protein, 6 aa, Artificial Sequence
  Description of Artificial Sequence: Synthetic peptide
QSFSDD

SEQ ID NO: 2027 - protein, 3 aa, Artificial Sequence
  Description of Artificial Sequence: Synthetic peptide
AAS

SEQ ID NO: 2028 - protein, 9 aa, Artificial Sequence
  Description of Artificial Sequence: Synthetic peptide
QQYNNWPQT

SEQ ID NO: 2029 - protein, 127 aa, Artificial Sequence
  Description of Artificial Sequence: Synthetic polypeptide
QVQLVQSGVEVKKPGASVKVSCKASGYTFASYGISWVRQAPGQGLEWMGWISVYNGKTNPAERHLGRVTMTTDTSTNTAYMELRNLKSDDTAVYYCAREGGFYGSGSHYRYFAMDVWGQGTTVIVSS

SEQ ID NO: 2030 - protein, 8 aa, Artificial Sequence
  Description of Artificial Sequence: Synthetic peptide
GYTFASYG

SEQ ID NO: 2031 - protein, 8 aa, Artificial Sequence
  Description of Artificial Sequence: Synthetic peptide
ISVYNGKT

SEQ ID NO: 2032 - protein, 20 aa, Artificial Sequence
  Description of Artificial Sequence: Synthetic peptide
AREGGFYGSGSHYRYFAMDV

SEQ ID NO: 2033 - protein, 112 aa, Artificial Sequence
  Description of Artificial Sequence: Synthetic polypeptide
DIVMTQTPLSLPVTLGQPASLSCRSSQSLVFTDGNTYLNWFQQRPGQSPRRLIYKVSSRDPGVPDRFSGTGSGTDFTLEISRVEAEDIGVYYCMQGTHWPPIFGQGTKVEIK

SEQ ID NO: 2034 - protein, 11 aa, Artificial Sequence
  Description of Artificial Sequence: Synthetic peptide
QSLVFTDGNTY

SEQ ID NO: 2035 - protein, 3 aa, Artificial Sequence
  Description of Artificial Sequence: Synthetic peptide
KVS

SEQ ID NO: 2036 - protein, 9 aa, Artificial Sequence
  Description of Artificial Sequence: Synthetic peptide
MQGTHWPPI

SEQ ID NO: 2037 - protein, 118 aa, Artificial Sequence
  Description of Artificial Sequence: Synthetic polypeptide
QVQLVQSGGGVVRPGGSLRLSCAASGFSFIDYGMSWVRQVPGKGLEWVAGMNWSGDKKGHAESVKGRFIISRDNAKNTLYLEMSSLRVEDTALYFCARGEYSNRFDPRGRGTLVTVSS

SEQ ID NO: 2038 - protein, 8 aa, Artificial Sequence
  Description of Artificial Sequence: Synthetic peptide
GFSFIDYG

SEQ ID NO: 2039 - protein, 8 aa, Artificial Sequence
  Description of Artificial Sequence: Synthetic peptide
MNWSGDKK

SEQ ID NO: 2040 - protein, 8 aa, Artificial Sequence
  Description of Artificial Sequence: Synthetic peptide
ARGEYSNR

SEQ ID NO: 2041 - protein, 108 aa, Artificial Sequence
  Description of Artificial Sequence: Synthetic polypeptide
EIVLTQSPGTLSLSPGERATLSCRASQSVSSSYLGWYQQKPGQAPRLLIYGASIRATGIPDRFSGSGSGTDFTLTISRLEPDDFAVYYCQHYDNSLITFGHGTRLDIK

SEQ ID NO: 2042 - protein, 7 aa, Artificial Sequence
  Description of Artificial Sequence: Synthetic peptide
QSVSSSY

SEQ ID NO: 2043 - protein, 3 aa, Artificial Sequence
  Description of Artificial Sequence: Synthetic peptide
GAS

SEQ ID NO: 2044 - protein, 15 aa, Artificial Sequence
  Description of Artificial Sequence: Synthetic peptide
QHYDNSLITFGHGTR

SEQ ID NO: 2045 - protein, 124 aa, Artificial Sequence
  Description of Artificial Sequence: Synthetic polypeptide
EVQLQESGPGLVKPSETLSLTCTVSGGSISSDYWTWIRQPAGKGLEWIGRIYPRGTSNYNPSLKSRVTMSVDTSKNQISLRLSSVTAADTAVYYCAREYYYVTNGYFSPGFDYWGQGTLVTVSS

SEQ ID NO: 2046 - protein, 8 aa, Artificial Sequence
  Description of Artificial Sequence: Synthetic peptide
GGSISSDY

SEQ ID NO: 2047 - protein, 7 aa, Artificial Sequence
  Description of Artificial Sequence: Synthetic peptide
IYPRGTS

SEQ ID NO: 2048 - protein, 18 aa, Artificial Sequence
  Description of Artificial Sequence: Synthetic peptide
AREYYYVTNGYFSPGFDY

SEQ ID NO: 2049 - protein, 111 aa, Artificial Sequence
  Description of Artificial Sequence: Synthetic polypeptide
DIVMTQSPLSLPVTPGEPASISCRSSQSLHSNGYNYLDWYLQKPGQSPQLLIYLVSNRASGVPDRFSGTGSGTDFTLKISRVEAEDVGVYYCMQAVQTPFTFGPGTKVDIK

SEQ ID NO: 2050 - protein, 10 aa, Artificial Sequence
  Description of Artificial Sequence: Synthetic peptide
QSLHSNGYNY

SEQ ID NO: 2051 - protein, 3 aa, Artificial Sequence
  Description of Artificial Sequence: Synthetic peptide
LVS

SEQ ID NO: 2052 - protein, 9 aa, Artificial Sequence
  Description of Artificial Sequence: Synthetic peptide
MQAVQTPFT

SEQ ID NO: 2053 - protein, 122 aa, Artificial Sequence
  Description of Artificial Sequence: Synthetic polypeptide
EVQLVESGGGVVQPGKSLRLSCAASGFIFSSFAVHWVRQAPGKGLEWVATISSDGSNEDYVDSVKGRFIISRDNSKNTLYLQMNSLRRDDTAVYYCGTGHSTEYYDGLLGVWGHGTTVSVSS

SEQ ID NO: 2054 - protein, 8 aa, Artificial Sequence
  Description of Artificial Sequence: Synthetic peptide
GFIFSSFA

SEQ ID NO: 2055 - protein, 8 aa, Artificial Sequence
  Description of Artificial Sequence: Synthetic peptide
ISSDGSNE

SEQ ID NO: 2056 - protein, 15 aa, Artificial Sequence
  Description of Artificial Sequence: Synthetic peptide
GTGHSTEYYDGLLGV

SEQ ID NO: 2057 - protein, 108 aa, Artificial Sequence
  Description of Artificial Sequence: Synthetic polypeptide
QSVVTQPPSVSAAPGRKVTISCSGSSSNIGSNYVSWYQQVPGTAPKLLIYEDDKRPSGIPDRFSGSKGTSATLGITGLQTGDEADYFCATWDRTVNVVRFGGGTRLTV

SEQ ID NO: 2058 - protein, 8 aa, Artificial Sequence
  Description of Artificial Sequence: Synthetic peptide
SSNIGSNY

SEQ ID NO: 2059 - protein, 3 aa, Artificial Sequence
  Description of Artificial Sequence: Synthetic peptide
EDD

SEQ ID NO: 2060 - protein, 11 aa, Artificial Sequence
  Description of Artificial Sequence: Synthetic peptide
ATWDRTVNVVR

SEQ ID NO: 2061 - protein, 115 aa, Artificial Sequence
  Description of Artificial Sequence: Synthetic polypeptide
QLQLQESGPGLVKPSETLSLTCTVSGGSISSSSYYWGWIRQPPGKGLEWGSIYYSGTYYNPSLKSRVTISVDTSKNQFSLKLSSTAADTAVYYCARHVGHELDYWGQGTLVTVSS

SEQ ID NO: 2062 - protein, 10 aa, Artificial Sequence
  Description of Artificial Sequence: Synthetic peptide
GGSISSSSYY

SEQ ID NO: 2063 - protein, 6 aa, Artificial Sequence
  Description of Artificial Sequence: Synthetic peptide
IYYSGT

SEQ ID NO: 2064 - protein, 10 aa, Artificial Sequence
  Description of Artificial Sequence: Synthetic peptide
ARHVGHELDY

SEQ ID NO: 2065 - protein, 111 aa, Artificial Sequence
  Description of Artificial Sequence: Synthetic polypeptide
DVVMTQSPLSLPVTPGEPASISCRSSQSLLHSIGYNYLHWFLQKGQSPQLLIYLGSNRASGVPDRFSGSGSGTDFTLKISRVEAEDVGVYYCMQALQTPPTFGQGTRLEIK

SEQ ID NO: 2066 - protein, 11 aa, Artificial Sequence
  Description of Artificial Sequence: Synthetic peptide
QSLLHSIGYNY

SEQ ID NO: 2067 - protein, 3 aa, Artificial Sequence
  Description of Artificial Sequence: Synthetic peptide
LGS

SEQ ID NO: 2068 - protein, 9 aa, Artificial Sequence
  Description of Artificial Sequence: Synthetic peptide
MQALQTPPT

SEQ ID NO: 2069 - protein, 118 aa, Artificial Sequence
  Description of Artificial Sequence: Synthetic polypeptide
QLQLQESGPGLVKPSGTLSLTCAVSGGSISSSNWWSWVRQPPGKGLEWIGEIYHSGSTNYNPSLKSRVTISDKSKNQFSLKLSSVTAADTAVYYCVGSPYGDYVLDYWGQGTLVTVSS

SEQ ID NO: 2070 - protein, 9 aa, Artificial Sequence
  Description of Artificial Sequence: Synthetic peptide
GGSISSSNW

SEQ ID NO: 2071 - protein, 7 aa, Artificial Sequence
  Description of Artificial Sequence: Synthetic peptide
IYHSGST

SEQ ID NO: 2072 - protein, 12 aa, Artificial Sequence
  Description of Artificial Sequence: Synthetic peptide
VGSPYGDYVLDY

SEQ ID NO: 2073 - protein, 110 aa, Artificial Sequence
  Description of Artificial Sequence: Synthetic polypeptide
QAVVTQPPSASGTPGQRVTISCSGSSSNIGSNTVNWYQQVPGTAPKLLIYSNNQRPSGVPDRFSGSKSGTSASLAISGLQSEDEADYYCAAWDDSLNGWVFGGGTKLTVL

SEQ ID NO: 2074 - protein, 8 aa, Artificial Sequence
  Description of Artificial Sequence: Synthetic peptide
SSNIGSNT

SEQ ID NO: 2075 - protein, 3 aa, Artificial Sequence
  Description of Artificial Sequence: Synthetic peptide
SNN

SEQ ID NO: 2076 - protein, 11 aa, Artificial Sequence
  Description of Artificial Sequence: Synthetic peptide
AAWDDSLNGWV

SEQ ID NO: 2077 - protein, 121 aa, Artificial Sequence
  Description of Artificial Sequence: Synthetic polypeptide
QMQLVQSGAEVKEPGESLRISCKGSGYSFTNFWISWVRQMPGKGLEWMGRVDPGYSYSTYSPSFQGHVTISADKSTSTAYLQWNSLKASDTAMYYCARVQYSGYYDWFDPWGQGTLVTVSS

SEQ ID NO: 2078 - protein, 8 aa, Artificial Sequence
  Description of Artificial Sequence: Synthetic peptide
GYSFTNFW

SEQ ID NO: 2079 - protein, 8 aa, Artificial Sequence
  Description of Artificial Sequence: Synthetic peptide
VDPGYSYS

SEQ ID NO: 2080 - protein, 14 aa, Artificial Sequence
  Description of Artificial Sequence: Synthetic peptide
ARVQYSGYYDWFDP

SEQ ID NO: 2081 - protein, 107 aa, Artificial Sequence
  Description of Artificial Sequence: Synthetic polypeptide
DIVMTQSQKFMSTSVGDRVSITCKASQNVHTAVAWYQQKAGQSPKALIYLASNRHTGVPDRFTGSGSGTDFTLTISNVQSEDLADYFCLQHWNNPLTFGAGTKLELK

SEQ ID NO: 2082 - protein, 6 aa, Artificial Sequence
  Description of Artificial Sequence: Synthetic peptide
QNVHTA

SEQ ID NO: 2083 - protein, 3 aa, Artificial Sequence
  Description of Artificial Sequence: Synthetic peptide
LAS

SEQ ID NO: 2084 - protein, 9 aa, Artificial Sequence
  Description of Artificial Sequence: Synthetic peptide
LQHWNNPLT

SEQ ID NO: 2085 - protein, 117 aa, Artificial Sequence
  Description of Artificial Sequence: Synthetic polypeptide
QVQLKESGPGLVAPSQSLSITCTVSGFSLTGYGVNWVRQPPGKGLEWLGMIWGDGSTDYNSALKSRLSISKDNSKSQVFLKMNSLQTDDTARYYCARDPYGYIFDYWGQGTTLTVSS

SEQ ID NO: 2086 - protein, 8 aa, Artificial Sequence
  Description of Artificial Sequence: Synthetic peptide
GFSLTGYG

SEQ ID NO: 2087 - protein, 7 aa, Artificial Sequence
  Description of Artificial Sequence: Synthetic peptide
IWGDGST

SEQ ID NO: 2088 - protein, 11 aa, Artificial Sequence
  Description of Artificial Sequence: Synthetic peptide
ARDPYGYIFDY

SEQ ID NO: 2089 - protein, 107 aa, Artificial Sequence
  Description of Artificial Sequence: Synthetic polypeptide
DIVMTQSQKFMSTSVGDRVSVTCRASQNVFTNVAWYQQKPGQAPKALIYSTSYRYSGVPDRFTGSGSGTDFTLTISNVQSEDLAEYFCQQYISYPLTFGAGTKLELK

SEQ ID NO: 2090 - protein, 6 aa, Artificial Sequence
  Description of Artificial Sequence: Synthetic peptide
QNVFTN

SEQ ID NO: 2091 - protein, 3 aa, Artificial Sequence
  Description of Artificial Sequence: Synthetic peptide
STS

SEQ ID NO: 2092 - protein, 9 aa, Artificial Sequence
  Description of Artificial Sequence: Synthetic peptide
QQYISYPLT

SEQ ID NO: 2093 - protein, 116 aa, Artificial Sequence
  Description of Artificial Sequence: Synthetic polypeptide
QVQLKQSGPGLVQPSQSLSITCTVSGFSLTNYGVHWVRQSPGKGLEWLGVIWSGGSTDYNAAFISRLSISKDNSKQVFFKMNSLQANDTAIYYCARNWVPYYFDYWGQGTTLTVSS

SEQ ID NO: 2094 - protein, 8 aa, Artificial Sequence
  Description of Artificial Sequence: Synthetic peptide
GFSLTNYG

SEQ ID NO: 2095 - protein, 7 aa, Artificial Sequence
  Description of Artificial Sequence: Synthetic peptide
IWSGGST

SEQ ID NO: 2096 - protein, 11 aa, Artificial Sequence
  Description of Artificial Sequence: Synthetic peptide
ARNWVPYYFDY

SEQ ID NO: 2097 - protein, 107 aa, Artificial Sequence
  Description of Artificial Sequence: Synthetic polypeptide
ETTLTQSPGTLSLSPGERATLSCRASQSVSSNYLAWYQQKPGQAPRLLIYAASSRATGIPDRFSGSGSGTDFTLTISRLEPEDFAVYYCQQYGSSRSFGQGTKLEIK

SEQ ID NO: 2098 - protein, 7 aa, Artificial Sequence
  Description of Artificial Sequence: Synthetic peptide
QSVSSNY

SEQ ID NO: 2099 - protein, 3 aa, Artificial Sequence
  Description of Artificial Sequence: Synthetic peptide
AAS

SEQ ID NO: 2100 - protein, 8 aa, Artificial Sequence
  Description of Artificial Sequence: Synthetic peptide
QQYGSSRS

SEQ ID NO: 2101 - protein, 122 aa, Artificial Sequence
  Description of Artificial Sequence: Synthetic polypeptide
QVQLQESGGGLVKPGGSLRLSCAASGFTFSSYSMNWVRQAPGKGLEWVSYISSSGSTIYYADSVRGRFTISRDNAKNTLYLQMNSLRAEDTAVYYCVRGDPYFFYYYGMDIWGQGTTVTVSS

SEQ ID NO: 2102 - protein, 8 aa, Artificial Sequence
  Description of Artificial Sequence: Synthetic peptide
GFTFSSYS

SEQ ID NO: 2103 - protein, 8 aa, Artificial Sequence
  Description of Artificial Sequence: Synthetic peptide
ISSSGSTI

SEQ ID NO: 2104 - protein, 15 aa, Artificial Sequence
  Description of Artificial Sequence: Synthetic peptide
VRGDPYFFYYYGMDI

SEQ ID NO: 2105 - protein, 109 aa, Artificial Sequence
  Description of Artificial Sequence: Synthetic polypeptide
DIQLTQSPSSLSASVGDRVIITCRATQSISTHLNWYQQKPGKAPKLLIYSASSLQSGVPSRFSGSGSGSTDFTLTISSLQPEDFATYYCQQSYSSPPITFGQGTRLEIK

SEQ ID NO: 2106 - protein, 6 aa, Artificial Sequence
  Description of Artificial Sequence: Synthetic peptide
QSISTH

SEQ ID NO: 2107 - protein, 3 aa, Artificial Sequence
  Description of Artificial Sequence: Synthetic peptide
SAS

SEQ ID NO: 2108 - protein, 10 aa, Artificial Sequence
  Description of Artificial Sequence: Synthetic peptide
QQSYSSPPIT

SEQ ID NO: 2109 - protein, 120 aa, Artificial Sequence
  Description of Artificial Sequence: Synthetic polypeptide
QVQLQESGPGLVKPSETLSLTCTVSGGSISSNMYYWGWVRQPPGKGLEWIGSIDYSGSTYYNPSLRSRVTMSVDTSKKQFSLKMTSVTAADTAVYYCARESGSPYYFDYWGQGTLVTVSS

SEQ ID NO: 2110 - protein, 10 aa, Artificial Sequence
  Description of Artificial Sequence: Synthetic peptide
GGSISSNMYY

SEQ ID NO: 2111 - protein, 7 aa, Artificial Sequence
  Description of Artificial Sequence: Synthetic peptide
IDYSGST

SEQ ID NO: 2112 - protein, 12 aa, Artificial Sequence
  Description of Artificial Sequence: Synthetic peptide
ARESGSPYYFDY

SEQ ID NO: 2113 - protein, 108 aa, Artificial Sequence
  Description of Artificial Sequence: Synthetic polypeptide
ETTLTQSPGTLSLSPGERATLSCRASQSVSSSYLAWYQQKPGQAPRLLIYGASTRATGVPDRFSGSGSGTDFTLISRLEPEDFAVYYCQQYGTSLTWYFGQGTKVEIK

SEQ ID NO: 2114 - protein, 7 aa, Artificial Sequence
  Description of Artificial Sequence: Synthetic peptide
QSVSSSY

SEQ ID NO: 2115 - protein, 3 aa, Artificial Sequence
  Description of Artificial Sequence: Synthetic peptide
GAS

SEQ ID NO: 2116 - protein, 10 aa, Artificial Sequence
  Description of Artificial Sequence: Synthetic peptide
QQYGTSLTWY

SEQ ID NO: 2117 - protein, 125 aa, Artificial Sequence
  Description of Artificial Sequence: Synthetic polypeptide
QVQLQESGPGLVKPSETLSLTCTVSGGSISSSSYYWAWIRQPPGKLEWIGEWINHSGSTNYNPSLKSRVTISVDTSKNQFSLNLNSVTAADTAVYYCARVVAAAGHYYYYYMDVWGKGTTVTVSS

SEQ ID NO: 2118 - protein, 10 aa, Artificial Sequence
  Description of Artificial Sequence: Synthetic peptide
GGSISSSSYY

SEQ ID NO: 2119 - protein, 8 aa, Artificial Sequence
  Description of Artificial Sequence: Synthetic peptide
WINHSGST

SEQ ID NO: 2120 - protein, 17 aa, Artificial Sequence
  Description of Artificial Sequence: Synthetic peptide
ARVVAAAGHYYYYYMDV

SEQ ID NO: 2121 - protein, 107 aa, Artificial Sequence
  Description of Artificial Sequence: Synthetic polypeptide
ETTLTQSPGTLSLSPGERATLSCRASQSVSSRYLAWYQQKPGQAPRLLIYGASSRATGIPDRFSGSGSGTDFTLTISRLEPEDFAVYYCQQYGSSNTFGQGTKLEIK

SEQ ID NO: 2122 - protein, 7 aa, Artificial Sequence
  Description of Artificial Sequence: Synthetic peptide
QSVSSRY

SEQ ID NO: 2123 - protein, 3 aa, Artificial Sequence
  Description of Artificial Sequence: Synthetic peptide
GAS

SEQ ID NO: 2124 - protein, 8 aa, Artificial Sequence
  Description of Artificial Sequence: Synthetic peptide
QQYGSSNT

SEQ ID NO: 2125 - protein, 122 aa, Artificial Sequence
  Description of Artificial Sequence: Synthetic polypeptide
QVQLQESGPGLVKPSETLSLTCTVSGGSISSSYYWGWIRQPPGKGLEWIGSIYYSGSTYYNPSLKSRVTISVDTSKNQFSLKLSSVTAADTAVYYCARSRSGSYLNDAFDIWGQGTMVTVSS

SEQ ID NO: 2126 - protein, 9 aa, Artificial Sequence
  Description of Artificial Sequence: Synthetic peptide
GGSISSSYY

SEQ ID NO: 2127 - protein, 7 aa, Artificial Sequence
  Description of Artificial Sequence: Synthetic peptide
IYYSGST

SEQ ID NO: 2128 - protein, 15 aa, Artificial Sequence
  Description of Artificial Sequence: Synthetic peptide
ARSRSGSYLNDAFDI

SEQ ID NO: 2129 - protein, 108 aa, Artificial Sequence
  Description of Artificial Sequence: Synthetic polypeptide
ETTLTQSPGTLSLSPGERATLSCRASQSVSSSYLAWYQQKPGQAPRLLIYGASSRATGIPDRFSGSGSGTDFTLTISRLEPEDFAVYYCQQYGSSSGTFGQGTKVEIK

SEQ ID NO: 2130 - protein, 7 aa, Artificial Sequence
  Description of Artificial Sequence: Synthetic peptide
QSVSSSY

SEQ ID NO: 2131 - protein, 3 aa, Artificial Sequence
  Description of Artificial Sequence: Synthetic peptide
GAS

SEQ ID NO: 2132 - protein, 9 aa, Artificial Sequence
  Description of Artificial Sequence: Synthetic peptide
QQYGSSSGT

SEQ ID NO: 2133 - protein, 121 aa, Artificial Sequence
  Description of Artificial Sequence: Synthetic polypeptide
QVQLQQSGAEVKKPGSSVKVSCKASGGTFSSYAISWVRQAPGQGLEWMGRIIPILGIANYAQKFQGRVTITADKSTSTAYMELSSLRSEDTAVYYCARGFRPYYYYGMDVWGQGTTVTVSS

SEQ ID NO: 2134 - protein, 8 aa, Artificial Sequence
  Description of Artificial Sequence: Synthetic peptide
GGTFSSYA

SEQ ID NO: 2135 - protein, 8 aa, Artificial Sequence
  Description of Artificial Sequence: Synthetic peptide
IIPILGIA

SEQ ID NO: 2136 - protein, 14 aa, Artificial Sequence
  Description of Artificial Sequence: Synthetic peptide
ARGFRPYYYYGMDV

SEQ ID NO: 2137 - protein, 110 aa, Artificial Sequence
  Description of Artificial Sequence: Synthetic polypeptide
QSVVTQPPSVSGAPGQRVTISCTGSSSNIGAGYDVHWYQQLPGTAPKLLIYGNSNRPSGVPDRFSGSKSGTSASLAITGLQAEDEADYYCQSYDSSLSALFGGGTKLTVL

SEQ ID NO: 2138 - protein, 9 aa, Artificial Sequence
  Description of Artificial Sequence: Synthetic peptide
SSNIGAGYD

SEQ ID NO: 2139 - protein, 3 aa, Artificial Sequence
  Description of Artificial Sequence: Synthetic peptide
GNS

SEQ ID NO: 2140 - protein, 10 aa, Artificial Sequence
  Description of Artificial Sequence: Synthetic peptide
QSYDSSLSAL

SEQ ID NO: 2141 - protein, 127 aa, Artificial Sequence
  Description of Artificial Sequence: Synthetic polypeptide
QVQLQQSGPGLVKPSETLSLTCTVSGGSIRNYYWSWIRQPPGKGLEWIGYMYYSGGANYNPSLNSRVTISLDTSKNQFSLKLTSVTAADTAVYYCARIPNYYDRSGYYPGYWYFDLWGRGTLVTVSS

SEQ ID NO: 2142 - protein, 8 aa, Artificial Sequence
  Description of Artificial Sequence: Synthetic peptide
GGSIRNYY

SEQ ID NO: 2143 - protein, 7 aa, Artificial Sequence
  Description of Artificial Sequence: Synthetic peptide
MYYSGGA

SEQ ID NO: 2144 - protein, 21 aa, Artificial Sequence
  Description of Artificial Sequence: Synthetic peptide
ARIPNYYDRSGYYPGYWYFDL

SEQ ID NO: 2145 - protein, 107 aa, Artificial Sequence
  Description of Artificial Sequence: Synthetic polypeptide
DIQLTQSPSSLSASVGDRVTITCRASQSISTYLNWYQHRPGKAPKLLIYSASSLQSGVPSRFSGSGSGTDFTLTISSLQPEDFATYYCQQSDIIPLTFGGGTKVEIN

SEQ ID NO: 2146 - protein, 6 aa, Artificial Sequence
  Description of Artificial Sequence: Synthetic peptide
QSISTY

SEQ ID NO: 2147 - protein, 3 aa, Artificial Sequence
  Description of Artificial Sequence: Synthetic peptide
SAS

SEQ ID NO: 2148 - protein, 9 aa, Artificial Sequence
  Description of Artificial Sequence: Synthetic peptide
QQSDIIPLT

SEQ ID NO: 2149 - protein, 123 aa, Artificial Sequence
  Description of Artificial Sequence: Synthetic polypeptide
QVQLQQSGPGLVKPSQTLSLTCAISGDSISSNSVVWNWIRQSPSRGLEWLGRTYYRSKWYNDYAVSVKSRITINPDTSKNQFSLQLNSVTPDDTALYYCARASFGTSGKFDDWGQGTLVTVSS

SEQ ID NO: 2150 - protein, 10 aa, Artificial Sequence
  Description of Artificial Sequence: Synthetic peptide
GDSISSNSVV

SEQ ID NO: 2151 - protein, 9 aa, Artificial Sequence
  Description of Artificial Sequence: Synthetic peptide
TYYRSKWYN

SEQ ID NO: 2152 - protein, 13 aa, Artificial Sequence
  Description of Artificial Sequence: Synthetic peptide
ARASFGTSGKFDD

SEQ ID NO: 2153 - protein, 107 aa, Artificial Sequence
  Description of Artificial Sequence: Synthetic polypeptide
SYVLTQPPSVSEAPGKTARITCEGITIGRKSVHWYQQKPGQAPVLVVYDDTVRPSGVPERFSGSNSGNTATLIISGVEAGDEADYCQVWDSSTDPQVVFGGGTKTVL

SEQ ID NO: 2154 - protein, 6 aa, Artificial Sequence
  Description of Artificial Sequence: Synthetic peptide
TIGRKS

SEQ ID NO: 2155 - protein, 3 aa, Artificial Sequence
  Description of Artificial Sequence: Synthetic peptide
DDT

SEQ ID NO: 2156 - protein, 12 aa, Artificial Sequence
  Description of Artificial Sequence: Synthetic peptide
QVWDSSTDPQVV

SEQ ID NO: 2157 - protein, 119 aa, Artificial Sequence
  Description of Artificial Sequence: Synthetic polypeptide
QVQLQQSGPGLVKPSQTLSLTCAISGDSVSSKNSSWNWIRQSPSRGLEWLGRTYYRSKWYYDYAVSVKGRITFTFPDTSKNQVSLHLNAVTPEDTAMYYCVRGSIFDVWGQGTMVTVSS

SEQ ID NO: 2158 - protein, 10 aa, Artificial Sequence
  Description of Artificial Sequence: Synthetic peptide
GDSVSSKNSS

SEQ ID NO: 2159 - protein, 9 aa, Artificial Sequence
  Description of Artificial Sequence: Synthetic peptide
TYYRSKWYY

SEQ ID NO: 2160 - protein, 9 aa, Artificial Sequence
  Description of Artificial Sequence: Synthetic peptide
CVRGSIFDV

SEQ ID NO: 2161 - protein, 110 aa, Artificial Sequence
  Description of Artificial Sequence: Synthetic polypeptide
NFMLTQPHSVSESPGKTVTISCTGSGGSIATNYVQWYQQRPGSAPATVIYEDDQRPSGVPDRFSGSIDSSSNSASLTISGLKTEDEADYYCQSYDSSNQVFGGGTKLTVL

SEQ ID NO: 2162 - protein, 8 aa, Artificial Sequence
  Description of Artificial Sequence: Synthetic peptide
GGSIATNY

SEQ ID NO: 2163 - protein, 3 aa, Artificial Sequence
  Description of Artificial Sequence: Synthetic peptide
EDD

SEQ ID NO: 2164 - protein, 9 aa, Artificial Sequence
  Description of Artificial Sequence: Synthetic peptide
QSYDSSNQV

SEQ ID NO: 2165 - protein, 118 aa, Artificial Sequence
  Description of Artificial Sequence: Synthetic polypeptide
QVQLQQWGAGLLKPSETLSLTCAVYGGSFSGYYWSWIRQPPGKGLEWIGEINHSGSTNYNPSLKSRVTISVDTSKNQFSLKLSSVTAADTAVYYCARMVRYYYGMDVWGQGTTVTVSS

SEQ ID NO: 2166 - protein, 8 aa, Artificial Sequence
  Description of Artificial Sequence: Synthetic peptide
GGSFSGYY

SEQ ID NO: 2167 - protein, 7 aa, Artificial Sequence
  Description of Artificial Sequence: Synthetic peptide
INHSGST

SEQ ID NO: 2168 - protein, 12 aa, Artificial Sequence
  Description of Artificial Sequence: Synthetic peptide
ARMVRYYYGMDV

SEQ ID NO: 2169 - protein, 109 aa, Artificial Sequence
  Description of Artificial Sequence: Synthetic polypeptide
ETTLTQSPGTLSLSPGERATLSCRASQSVGSNLAWYQQRPGQAPSLLIYGASSRATGVPDRFSGSGSGTDFTLTISRLEPEDFAVYYCQQYGDSPRLYTFGQGTKLEIK

SEQ ID NO: 2170 - protein, 6 aa, Artificial Sequence
  Description of Artificial Sequence: Synthetic peptide
QSVGSN

SEQ ID NO: 2171 - protein, 3 aa, Artificial Sequence
  Description of Artificial Sequence: Synthetic peptide
GAS

SEQ ID NO: 2172 - protein, 11 aa, Artificial Sequence
  Description of Artificial Sequence: Synthetic peptide
QQYGDSPRLYT

SEQ ID NO: 2173 - protein, 125 aa, Artificial Sequence
  Description of Artificial Sequence: Synthetic polypeptide
QVQLQQWGAGLLKPSETLSLTCAVYGGSFSGYYWSWIRQPPGKGLEWIGEINHSGSTNYNPSLKSRVTISVDTSKNQFSLKLSSVTAADTAVYYCARVAYYDSSGYYPYDAFDIWGQGTMVTVSS

SEQ ID NO: 2174 - protein, 8 aa, Artificial Sequence
  Description of Artificial Sequence: Synthetic peptide
GGSFSGYY

SEQ ID NO: 2175 - protein, 7 aa, Artificial Sequence
  Description of Artificial Sequence: Synthetic peptide
INHSGST

SEQ ID NO: 2176 - protein, 19 aa, Artificial Sequence
  Description of Artificial Sequence: Synthetic peptide
ARVAYYDSSGYYPYDAFDI

SEQ ID NO: 2177 - protein, 107 aa, Artificial Sequence
  Description of Artificial Sequence: Synthetic polypeptide
DVVMTQSPGTLSVSPGDSATLSCWASQLSDSYVSWYQQKPGQAPRLLIHSASIRAPGIPDRFSGSVSGTEFTLTISGLEPEDFAVYSCHQYGFLPWTFGQGTKVEIR

SEQ ID NO: 2178 - protein, 6 aa, Artificial Sequence
  Description of Artificial Sequence: Synthetic peptide
QLSDSY

SEQ ID NO: 2179 - protein, 3 aa, Artificial Sequence
  Description of Artificial Sequence: Synthetic peptide
SAS

SEQ ID NO: 2180 - protein, 9 aa, Artificial Sequence
  Description of Artificial Sequence: Synthetic peptide
HQYGFLPWT

SEQ ID NO: 2181 - protein, 120 aa, Artificial Sequence
  Description of Artificial Sequence: Synthetic polypeptide
QVQLVQSGAEVKKPGASVKVSCKASGYTFTRYGISWVRQAPGQGLEWMGWISSSNGYTKYAQNLQGRLTLTTDTSTGTAYMELRSLRSEDTALYYCARYDISGLDGFDIWGQGTMVTVSS

SEQ ID NO: 2182 - protein, 8 aa, Artificial Sequence
  Description of Artificial Sequence: Synthetic peptide
GYTFTRYG

SEQ ID NO: 2183 - protein, 8 aa, Artificial Sequence
  Description of Artificial Sequence: Synthetic peptide
ISSSNGYT

SEQ ID NO: 2184 - protein, 13 aa, Artificial Sequence
  Description of Artificial Sequence: Synthetic peptide
ARYDISGLDGFDI

SEQ ID NO: 2185 - protein, 108 aa, Artificial Sequence
  Description of Artificial Sequence: Synthetic polypeptide
ETTLTQSPGTLSLSPGERATLSCRASRYINANFLAWYQQKPGQAPRLLIYDASTRATGIPDRFSGSGSGTDFTLTISRLEPEDFAVYYCQQYGSSPRTFGQGTKVEIK

SEQ ID NO: 2186 - protein, 7 aa, Artificial Sequence
  Description of Artificial Sequence: Synthetic peptide
RYINANF

SEQ ID NO: 2187 - protein, 3 aa, Artificial Sequence
  Description of Artificial Sequence: Synthetic peptide
DAS

SEQ ID NO: 2188 - protein, 9 aa, Artificial Sequence
  Description of Artificial Sequence: Synthetic peptide
QQYGSSPRT

SEQ ID NO: 2189 - protein, 122 aa, Artificial Sequence
  Description of Artificial Sequence: Synthetic polypeptide
QVQLVQSGAEVKKPGSSVKVSCKASGGTFSSYAISWVRQAPGQGLEWMGGIIPIFGTATNYAQKFQGRVTITADESTSTAYMELSSLRSEDTAVYYCARDSSGWLYDAFDIWGQGTMVTVSS

SEQ ID NO: 2190 - protein, 8 aa, Artificial Sequence
  Description of Artificial Sequence: Synthetic peptide
GGTFSSYA

SEQ ID NO: 2191 - protein, 8 aa, Artificial Sequence
  Description of Artificial Sequence: Synthetic peptide
IIPIFGTA

SEQ ID NO: 2192 - protein, 15 aa, Artificial Sequence
  Description of Artificial Sequence: Synthetic peptide
CARDSSGWLYDAFDI

SEQ ID NO: 2193 - protein, 107 aa, Artificial Sequence
  Description of Artificial Sequence: Synthetic polypeptide
DIQMTQSPSILSASVGDRVTITCRASQRFGDYLAWYQQKPGQAPKLLIYGASTLQSGVPSRFSGSGSGTEFTLTISGLQPEDFATYYCQQANSFPITFGKGTRLDIR

SEQ ID NO: 2194 - protein, 6 aa, Artificial Sequence
  Description of Artificial Sequence: Synthetic peptide
QRFGDY

SEQ ID NO: 2195 - protein, 3 aa, Artificial Sequence
  Description of Artificial Sequence: Synthetic peptide
GAS

SEQ ID NO: 2196 - protein, 15 aa, Artificial Sequence
  Description of Artificial Sequence: Synthetic peptide
QQANSFPITFGKGTR

SEQ ID NO: 2197 - protein, 119 aa, Artificial Sequence
  Description of Artificial Sequence: Synthetic polypeptide
QVQLVQSGAEVKKPGSSVKVSCKASGGTFSSYAISWVRQAPGQGLEWMGWINVGNGNAIYSQKFQGRVTITRDTSATTAYMELSSLRSEDTAVYYCARDGERAWDLDYWGQGTLVTVSS

SEQ ID NO: 2198 - protein, 8 aa, Artificial Sequence
  Description of Artificial Sequence: Synthetic peptide
GGTFSSYA

SEQ ID NO: 2199 - protein, 8 aa, Artificial Sequence
  Description of Artificial Sequence: Synthetic peptide
INVGNGNA

SEQ ID NO: 2200 - protein, 12 aa, Artificial Sequence
  Description of Artificial Sequence: Synthetic peptide
ARDGERAWDLDY

SEQ ID NO: 2201 - protein, 108 aa, Artificial Sequence
  Description of Artificial Sequence: Synthetic polypeptide
ETTLTQSPGTLSLSPGERATLSCRASQSVSSSYLAWYQQKPGQAPRLLIYGASSRATGIPDRFSGSGSGTDFTLTISRLEPEDFAVYYCQQYGSSPYTFGQGTKLEIK

SEQ ID NO: 2202 - protein, 7 aa, Artificial Sequence
  Description of Artificial Sequence: Synthetic peptide
QSVSSSY

SEQ ID NO: 2203 - protein, 3 aa, Artificial Sequence
  Description of Artificial Sequence: Synthetic peptide
GAS

SEQ ID NO: 2204 - protein, 9 aa, Artificial Sequence
  Description of Artificial Sequence: Synthetic peptide
QQYGSSPYT

SEQ ID NO: 2205 - protein, 123 aa, Artificial Sequence
  Description of Artificial Sequence: Synthetic polypeptide
QVQLVQSGGGVVQPGRSLRLSCAASGFTFSSYAMHWVRQAPGKGLEWVAVISYDGSNKYYADSVKGRFTISRDNSKNTLYLQMNSLRAEDTAVYYCARELRFLEWSSDAFDIWGQGTMVTVSS

SEQ ID NO: 2206 - protein, 8 aa, Artificial Sequence
  Description of Artificial Sequence: Synthetic peptide
GFTFSSYA

SEQ ID NO: 2207 - protein, 8 aa, Artificial Sequence
  Description of Artificial Sequence: Synthetic peptide
ISYDGSNK

SEQ ID NO: 2208 - protein, 16 aa, Artificial Sequence
  Description of Artificial Sequence: Synthetic peptide
ARELRFLEWSSDAFDI

SEQ ID NO: 2209 - protein, 108 aa, Artificial Sequence
  Description of Artificial Sequence: Synthetic polypeptide
ETTLTQSPGTLSLSPGERATLSCRASQSVSSSYLAWYQQKPGQAPRLLIYGASSRATGIPDRFSGSGSGTDFTLTISRLEPEDFAVYYCQQHDSSPRTFGQGTKVEIK

SEQ ID NO: 2210 - protein, 7 aa, Artificial Sequence
  Description of Artificial Sequence: Synthetic peptide
QSVSSSY

SEQ ID NO: 2211 - protein, 3 aa, Artificial Sequence
  Description of Artificial Sequence: Synthetic peptide
GAS

SEQ ID NO: 2212 - protein, 9 aa, Artificial Sequence
  Description of Artificial Sequence: Synthetic peptide
QQHDSSPRT

SEQ ID NO: 2213 - protein, 121 aa, Artificial Sequence
  Description of Artificial Sequence: Synthetic polypeptide
QVQLVQSGGGVVQPGRSLRLSCAASGFTFSSYGMHWVRQAPGKGLEWVAFISYDGSDKNFADSVKGRFTISRDNSKNTLYLQMNSLRAEDTAVYYCAKDSYYDNSAFQADWGQGTLVTVSS

SEQ ID NO: 2214 - protein, 8 aa, Artificial Sequence
  Description of Artificial Sequence: Synthetic peptide
GFTFSSYG

SEQ ID NO: 2215 - protein, 8 aa, Artificial Sequence
  Description of Artificial Sequence: Synthetic peptide
ISYDGSDK

SEQ ID NO: 2216 - protein, 14 aa, Artificial Sequence
  Description of Artificial Sequence: Synthetic peptide
AKDSYYDNSAFQAD

SEQ ID NO: 2217 - protein, 112 aa, Artificial Sequence
  Description of Artificial Sequence: Synthetic polypeptide
EIVLTQSPLSLPVTPGEPASISCRSSQSLLHSNGYNYLDWYLQKPGQSPQLLIYLGSNRASGVPDRFSGSGSGTDFTLKISRVEAEDVGVYYCMQALQTPRTFGQGTKVEIK

SEQ ID NO: 2218 - protein, 11 aa, Artificial Sequence
  Description of Artificial Sequence: Synthetic peptide
QSLLHSNGYNY

SEQ ID NO: 2219 - protein, 3 aa, Artificial Sequence
  Description of Artificial Sequence: Synthetic peptide
LGS

SEQ ID NO: 2220 - protein, 9 aa, Artificial Sequence
  Description of Artificial Sequence: Synthetic peptide
MQALQTPRT

SEQ ID NO: 2221 - protein, 124 aa, Artificial Sequence
  Description of Artificial Sequence: Synthetic polypeptide
QVQLVQSGGGVVQPGRSLRLSCAASGFTFSSYGMHWVRQAPGKGLEWVAVISYDGSNKYYADSVKGRFTISRDNSKNTLYLQMNSLRAEDTAVYYCARDFDYGDSYYYYGMDVWGQGTTVTVSS

SEQ ID NO: 2222 - protein, 8 aa, Artificial Sequence
  Description of Artificial Sequence: Synthetic peptide
GFTFSSYG

SEQ ID NO: 2223 - protein, 8 aa, Artificial Sequence
  Description of Artificial Sequence: Synthetic peptide
ISYDGSNK

SEQ ID NO: 2224 - protein, 17 aa, Artificial Sequence
  Description of Artificial Sequence: Synthetic peptide
ARDFDYGDSYYYYGMDV

SEQ ID NO: 2225 - protein, 111 aa, Artificial Sequence
  Description of Artificial Sequence: Synthetic polypeptide
DVMTQSPLSLPVTPGEPASISCRSSQSLLHSNGYKYVNWYLQKPGQSPQLLIYFGSYRASGVPDRFSGSGSGTDFTLKISRVEAEDVGIYYCMQATHWPYTFGQGTRLEIK

SEQ ID NO: 2226 - protein, 11 aa, Artificial Sequence
  Description of Artificial Sequence: Synthetic peptide
QSLLHSNGYKY

SEQ ID NO: 2227 - protein, 3 aa, Artificial Sequence
  Description of Artificial Sequence: Synthetic peptide
FGS

SEQ ID NO: 2228 - protein, 9 aa, Artificial Sequence
  Description of Artificial Sequence: Synthetic peptide
MQATHWPYT

SEQ ID NO: 2229 - protein, 120 aa, Artificial Sequence
  Description of Artificial Sequence: Synthetic polypeptide
QVQLVQSGGGVVQPGRSLRLSCAASGFTFSSYGMHWVRQAPGKGLEWVAVISYDGSNKYYADSVKGRFTISRDNSKNTLYLQMNSLRAEDTAVYYCARDYYGDYALLDYWGQGTLVTVSS

SEQ ID NO: 2230 - protein, 8 aa, Artificial Sequence
  Description of Artificial Sequence: Synthetic peptide
GFTFSSYG

SEQ ID NO: 2231 - protein, 8 aa, Artificial Sequence
  Description of Artificial Sequence: Synthetic peptide
ISYDGSNK

SEQ ID NO: 2232 - protein, 13 aa, Artificial Sequence
  Description of Artificial Sequence: Synthetic peptide
ARDYYGDYALLDY

SEQ ID NO: 2233 - protein, 109 aa, Artificial Sequence
  Description of Artificial Sequence: Synthetic polypeptide
EIVLTQSPDTLSLSPGEREATLSCRASQSVSHSYLAQYQQKPGQAPRLLIYDTSSRATDIPDRFSGSGSGTDFTLTISRLEPEDSAVYYCQQYVSSPLTFGQGTKLEIK

SEQ ID NO: 2234 - protein, 7 aa, Artificial Sequence
  Description of Artificial Sequence: Synthetic peptide
SQSVSHS

SEQ ID NO: 2235 - protein, 3 aa, Artificial Sequence
  Description of Artificial Sequence: Synthetic peptide
YDT

SEQ ID NO: 2236 - protein, 10 aa, Artificial Sequence
  Description of Artificial Sequence: Synthetic peptide
CQQYVSSPLT

SEQ ID NO: 2237 - protein, 122 aa, Artificial Sequence
  Description of Artificial Sequence: Synthetic polypeptide
QVQLVQSGGGVVQPGRSLRLSCAASGFTFSTYGLHWVRQAPGKGLEWVAFISYDGSNKYYADSVKGRFTISRDNSKNTLYLQMNGLRAEDTAVYYCAKTVGVTFVSDAFDIWGQGTMVTVSS

SEQ ID NO: 2238 - protein, 8 aa, Artificial Sequence
  Description of Artificial Sequence: Synthetic peptide
GFTFSTYG

SEQ ID NO: 2239 - protein, 8 aa, Artificial Sequence
  Description of Artificial Sequence: Synthetic peptide
ISYDGSNK

SEQ ID NO: 2240 - protein, 15 aa, Artificial Sequence
  Description of Artificial Sequence: Synthetic peptide
AKTVGVTFVSDAFDI

SEQ ID NO: 2241 - protein, 109 aa, Artificial Sequence
  Description of Artificial Sequence: Synthetic polypeptide
QSELTQPRSVSGSPGQSVTISCTGTSRDVGGYNYVSWYQQHPGKAPKLIIHDVIIRPSGVPDRFSGSKSGNTASLTISGLQAEDEAHYYCWSFAGSYYVFGTGTDVTVL

SEQ ID NO: 2242 - protein, 9 aa, Artificial Sequence
  Description of Artificial Sequence: Synthetic peptide
SRDVGGYNY

SEQ ID NO: 2243 - protein, 3 aa, Artificial Sequence
  Description of Artificial Sequence: Synthetic peptide
DVI

SEQ ID NO: 2244 - protein, 9 aa, Artificial Sequence
  Description of Artificial Sequence: Synthetic peptide
WSFAGSYYV

SEQ ID NO: 2245 - protein, 119 aa, Artificial Sequence
  Description of Artificial Sequence: Synthetic polypeptide
QVQLLESGGGLVQPGGSLRLSCAASGFTFSAYGMGWVRQAPGKGLEWVSSIGSSGGGTAYADSVKGRFTISRDNSKNTLYLQMNSLRAEDTAVYYCAGELLPYYGMDVWGQGTTVTVSS

SEQ ID NO: 2246 - protein, 8 aa, Artificial Sequence
  Description of Artificial Sequence: Synthetic peptide
GFTFSAYG

SEQ ID NO: 2247 - protein, 8 aa, Artificial Sequence
  Description of Artificial Sequence: Synthetic peptide
IGSSGGGT

SEQ ID NO: 2248 - protein, 12 aa, Artificial Sequence
  Description of Artificial Sequence: Synthetic peptide
AGELLPYYGMDV

SEQ ID NO: 2249 - protein, 108 aa, Artificial Sequence
  Description of Artificial Sequence: Synthetic polypeptide
ENVLTQSPAIMSASPGEKVTMTCRASSSVSSSLYHWYQQKSGASPKVWIYSTSNLASGVPGRFSGSGSGTSYSLTISSVEAEDAATYYCQQYSGYPITFGAGTKVEVK

SEQ ID NO: 2250 - protein, 7 aa, Artificial Sequence
  Description of Artificial Sequence: Synthetic peptide
SSVSSSL

SEQ ID NO: 2251 - protein, 3 aa, Artificial Sequence
  Description of Artificial Sequence: Synthetic peptide
STS

SEQ ID NO: 2252 - protein, 9 aa, Artificial Sequence
  Description of Artificial Sequence: Synthetic peptide
QQYSGYPIT

SEQ ID NO: 2253 - protein, 118 aa, Artificial Sequence
  Description of Artificial Sequence: Synthetic polypeptide
QVQLKESGPVLVAPSQTLSITCTVSGFSLASYNIHWVRQPPGKGLEWLGVIWAGGSTNYNSALMSRLSISKDNSKSQVFLQMNSLQTDDTAMYYCAKRSDDYSWFAYWGCQTLVTVSA

SEQ ID NO: 2254 - protein, 8 aa, Artificial Sequence
  Description of Artificial Sequence: Synthetic peptide
GFSLASYN

SEQ ID NO: 2255 - protein, 7 aa, Artificial Sequence
  Description of Artificial Sequence: Synthetic peptide
IWAGGST

SEQ ID NO: 2256 - protein, 12 aa, Artificial Sequence
  Description of Artificial Sequence: Synthetic peptide
AKRSDDYSWFAY

SEQ ID NO: 2257 - protein, 113 aa, Artificial Sequence
  Description of Artificial Sequence: Synthetic polypeptide
DIVMSQSPSSLAVSVGEKVTMSCKSSQSLLYRSNQKNYLAWYQQKPGQSPKLLIYWASTRESGVPDRFTGSGSGTDFTLTISSVKAEDLAVYYCQQYYNYPRTFGGGTKLEIK

SEQ ID NO: 2258 - protein, 12 aa, Artificial Sequence
  Description of Artificial Sequence: Synthetic peptide
QSLLYRSNQKNY

SEQ ID NO: 2259 - protein, 3 aa, Artificial Sequence
  Description of Artificial Sequence: Synthetic peptide
WAS

SEQ ID NO: 2260 - protein, 9 aa, Artificial Sequence
  Description of Artificial Sequence: Synthetic peptide
QQYYNYPRT

SEQ ID NO: 2261 - protein, 124 aa, Artificial Sequence
  Description of Artificial Sequence: Synthetic polypeptide
DVQVQESGPGLVKPSQSLSLTCTVTGYSITSDYAWNWIRQFPGNKLEWMGYISNSGSTSYNPSLKSRISITRDTSKNQFFLQLISVTTEDTATYYCARERNYDYDDYYYAMDYWGQGTTLTVSA

SEQ ID NO: 2262 - protein, 9 aa, Artificial Sequence
  Description of Artificial Sequence: Synthetic peptide
GYSITSDYA

SEQ ID NO: 2263 - protein, 7 aa, Artificial Sequence
  Description of Artificial Sequence: Synthetic peptide
ISNSGST

SEQ ID NO: 2264 - protein, 17 aa, Artificial Sequence
  Description of Artificial Sequence: Synthetic peptide
ARERNYDYDDYYYAMDY

SEQ ID NO: 2265 - protein, 107 aa, Artificial Sequence [sequence omitted]

SEQ ID NO: 2266 - protein, 6 aa, Artificial Sequence
  Description of Artificial Sequence: Synthetic peptide
QGISSW

SEQ ID NO: 2267 - protein, 3 aa, Artificial Sequence
  Description of Artificial Sequence: Synthetic peptide
GAS

SEQ ID NO: 2268 - protein, 9 aa, Artificial Sequence
  Description of Artificial Sequence: Synthetic peptide
QQANSFPWT

SEQ ID NO: 2269 - protein, 118 aa, Artificial Sequence [sequence omitted]

SEQ ID NO: 2270 - protein, 8 aa, Artificial Sequence
  Description of Artificial Sequence: Synthetic peptide
GYTLSDLS

SEQ ID NO: 2271 - protein, 8 aa, Artificial Sequence
  Description of Artificial Sequence: Synthetic peptide
FDPQDGET

SEQ ID NO: 2272 - protein, 11 aa, Artificial Sequence
  Description of Artificial Sequence: Synthetic peptide
ATGSSSSWFDP

SEQ ID NO: 2273 - protein, 112 aa, Artificial Sequence
  Description of Artificial Sequence: Synthetic polypeptide
DVVMTQSPLSLPVTPGEPASISCRSSQSLVHSNRNTYLHWYLQKPGQSPQLLIYKVSNRFSGVPDRFSGSGSGTDFTLKISRVEAEDVGVYYCSQNTHVPPTFGQGTKLEIK

SEQ ID NO: 2274 - protein, 11 aa, Artificial Sequence
  Description of Artificial Sequence: Synthetic peptide
QSLVHSNRNTY

SEQ ID NO: 2275 - protein, 3 aa, Artificial Sequence
  Description of Artificial Sequence: Synthetic peptide
KVS

SEQ ID NO: 2276 - protein, 9 aa, Artificial Sequence
  Description of Artificial Sequence: Synthetic peptide
SQNTHVPPT

SEQ ID NO: 2277 - protein, 115 aa, Artificial Sequence
  Description of Artificial Sequence: Synthetic polypeptide
QVQLVQSGAEVKKPGASVKVSCKASGYTFTDYEMHWVRQAPGQGLEWMGALDPKTGDTAYSQKFKGRVTLTADKSTSTAYMELSSLTSEDTAVYYCTRFYSYTYWGQGTLVTVSS

SEQ ID NO: 2278 - protein, 8 aa, Artificial Sequence
  Description of Artificial Sequence: Synthetic peptide
GYTFTDYE

SEQ ID NO: 2279 - protein, 8 aa, Artificial Sequence
  Description of Artificial Sequence: Synthetic peptide
LDPKTGDT

SEQ ID NO: 2280 - protein, 9 aa, Artificial Sequence
  Description of Artificial Sequence: Synthetic peptide
TRFYSYTYW

SEQ ID NO: 2281 - protein, 107 aa, Artificial Sequence [sequence omitted]

SEQ ID NO: 2282 - protein, 6 aa, Artificial Sequence
  Description of Artificial Sequence: Synthetic peptide
SLRSYY

SEQ ID NO: 2283 - protein, 3 aa, Artificial Sequence
  Description of Artificial Sequence: Synthetic peptide
GAN

SEQ ID NO: 2284 - protein, 11 aa, Artificial Sequence
  Description of Artificial Sequence: Synthetic peptide
NSADSSGNHVV

SEQ ID NO: 2285 - protein, 121 aa, Artificial Sequence [sequence omitted]

SEQ ID NO: 2286 - protein, 8 aa, Artificial Sequence
  Description of Artificial Sequence: Synthetic peptide
GFTFDDYA

SEQ ID NO: 2287 - protein, 8 aa, Artificial Sequence
  Description of Artificial Sequence: Synthetic peptide
INWQGGST

SEQ ID NO: 2288 - protein, 14 aa, Artificial Sequence
  Description of Artificial Sequence: Synthetic peptide
AKILGAGRGWYFDY

SEQ ID NO: 2289 - protein, 110 aa, Artificial Sequence [sequence omitted]

SEQ ID NO: 2290 - protein, 8 aa, Artificial Sequence
  Description of Artificial Sequence: Synthetic peptide
TSNIGGYD

SEQ ID NO: 2291 - protein, 3 aa, Artificial Sequence
  Description of Artificial Sequence: Synthetic peptide
DIN

SEQ ID NO: 2292 - protein, 14 aa, Artificial Sequence
  Description of Artificial Sequence: Synthetic peptide
QSYDSSLNAQVFGG

SEQ ID NO: 2293 - protein, 127 aa, Artificial Sequence [sequence omitted]

SEQ ID NO: 2294 - protein, 9 aa, Artificial Sequence
  Description of Artificial Sequence: Synthetic peptide
GGSISGGYG

SEQ ID NO: 2295 - protein, 8 aa, Artificial Sequence
  Description of Artificial Sequence: Synthetic peptide
FYSSSGNT

SEQ ID NO: 2296 - protein, 20 aa, Artificial Sequence
  Description of Artificial Sequence: Synthetic peptide
VRDRLFSVVGMVYNNWFDVW

SEQ ID NO: 2297 - protein, 112 aa, Artificial Sequence
  Description of Artificial Sequence: Synthetic polypeptide
DVQVTQSPSSLSASVGDRVTITCRSSQSLANSYGNTFLSWYLHKPGKAPQLLIYGISNRFSGVPDRFSGSGSGTDFTLTISSLQPEDFATYYCLQGTHQPYTFGQGTKVEIK

SEQ ID NO: 2298 - protein, 11 aa, Artificial Sequence
  Description of Artificial Sequence: Synthetic peptide
QSLANSYGNTF

SEQ ID NO: 2299 - protein, 3 aa, Artificial Sequence
  Description of Artificial Sequence: Synthetic peptide
GIS

SEQ ID NO: 2300 - protein, 9 aa, Artificial Sequence
  Description of Artificial Sequence: Synthetic peptide
LQGTHQPYT

SEQ ID NO: 2301 - protein, 121 aa, Artificial Sequence
  Description of Artificial Sequence: Synthetic polypeptide
EVQLVQSGAEVKKPGASVKVSCKASGYRFTNYWIHWVRQAPGQGLEWIGGINPGNNYATYRRKFQGRVTMTADTSTSTVYMELSSLRSEDTAVYYCTREGYGNYGAWFAYWGQGTLVTVSS

SEQ ID NO: 2302 - protein, 8 aa, Artificial Sequence
  Description of Artificial Sequence: Synthetic peptide
GYRFTNYW

SEQ ID NO: 2303 - protein, 8 aa, Artificial Sequence
  Description of Artificial Sequence: Synthetic peptide
INPGNNYA

SEQ ID NO: 2304 - protein, 14 aa, Artificial Sequence
  Description of Artificial Sequence: Synthetic peptide
TREGYGNYGAWFAY

SEQ ID NO: 2305 - protein, 107 aa, Artificial Sequence
  Description of Artificial Sequence: Synthetic polypeptide
DIQMTQSPSSLSASVGDRVTITCRASQDIRYYLNWYQQKPGKAPKLLIYVASSLQSGVPSRFSGSGSGTEFTLTVSSLQPEDFATYYCLQVYSTPRTFGQGTKVEIK

SEQ ID NO: 2306 - protein, 6 aa, Artificial Sequence
  Description of Artificial Sequence: Synthetic peptide
QDIRYY

SEQ ID NO: 2307 - protein, 3 aa, Artificial Sequence
  Description of Artificial Sequence: Synthetic peptide
VAS

SEQ ID NO: 2308 - protein, 9 aa, Artificial Sequence
  Description of Artificial Sequence: Synthetic peptide
LQVYSTPRT

SEQ ID NO: 2309 - protein, 118 aa, Artificial Sequence
  Description of Artificial Sequence: Synthetic polypeptide
EVQLVESGGGLAKPGGSLRLSCAASGFRFTFNNYYMDWVRQAPGQGLEWVSRISSSGDPTWYADSVKGRFTISRENANNTLFLQMNSLRAEDTAVYYCASLTTGSDSWGQGVLVTVSS

SEQ ID NO: 2310 - protein, 10 aa, Artificial Sequence
  Description of Artificial Sequence: Synthetic peptide
GFRFTFNNYY

SEQ ID NO: 2311 - protein, 8 aa, Artificial Sequence
  Description of Artificial Sequence: Synthetic peptide
ISSSGDPT

SEQ ID NO: 2312 - protein, 10 aa, Artificial Sequence
  Description of Artificial Sequence: Synthetic peptide
ASLTTGSDSW

SEQ ID NO: 2313 - protein, 106 aa, Artificial Sequence [sequence omitted]

SEQ ID NO: 2314 - protein, 5 aa, Artificial Sequence
  Description of Artificial Sequence: Synthetic peptide
SSVSY

SEQ ID NO: 2315 - protein, 3 aa, Artificial Sequence
  Description of Artificial Sequence: Synthetic peptide
APS

SEQ ID NO: 2316 - protein, 9 aa, Artificial Sequence
  Description of Artificial Sequence: Synthetic peptide
QQWSFNPPT

SEQ ID NO: 2317 - protein, 122 aa, Artificial Sequence [sequence omitted]

SEQ ID NO: 2318 - protein, 8 aa, Artificial Sequence
  Description of Artificial Sequence: Synthetic peptide
GYTFTSYN

SEQ ID NO: 2319 - protein, 8 aa, Artificial Sequence
  Description of Artificial Sequence: Synthetic peptide
IYPGNGDT

SEQ ID NO: 2320 - protein, 15 aa, Artificial Sequence
  Description of Artificial Sequence: Synthetic peptide
ARVVYYSNSYWYFDV

SEQ ID NO: 2321 - protein, 107 aa, Artificial Sequence
  Description of Artificial Sequence: Synthetic polypeptide
EIVLTQSPATLSLSPGERATLSCRASENVYSYLAWYQQKPGQAPRLLIYFAKTLAEGIPARFSGSGSGTDFTLTISSLEPEDFAVYYCQHHSDNPWTFGQGTKVEIK

SEQ ID NO: 2322 - protein, 6 aa, Artificial Sequence
  Description of Artificial Sequence: Synthetic peptide
ENVYSY

SEQ ID NO: 2323 - protein, 3 aa, Artificial Sequence
  Description of Artificial Sequence: Synthetic peptide
FAK

SEQ ID NO: 2324 - protein, 9 aa, Artificial Sequence
  Description of Artificial Sequence: Synthetic peptide
QHHSDNPWT

SEQ ID NO: 2325 - protein, 116 aa, Artificial Sequence
  Description of Artificial Sequence: Synthetic polypeptide
EVQLVQSGAEVKKPGESLKISCKGSGYSFTGYNMNWVRQMPGKGLEWMGNIDPYYGGTTYNRKFKGQVTISADKSISTAYLQWSSLKASDTAMYYCARSVGPFDSWGQGTLVTVSS

SEQ ID NO: 2326 - protein, 8 aa, Artificial Sequence
  Description of Artificial Sequence: Synthetic peptide
GYSFTGYN

SEQ ID NO: 2327 - protein, 8 aa, Artificial Sequence
  Description of Artificial Sequence: Synthetic peptide
IDPYYGGT

SEQ ID NO: 2328 - protein, 9 aa, Artificial Sequence
  Description of Artificial Sequence: Synthetic peptide
ARSVGPFDS

SEQ ID NO: 2329 - protein, 112 aa, Artificial Sequence
  Description of Artificial Sequence: Synthetic polypeptide
DIQMTQSPSSLSASVGDRVTITCRSSQSIVHSVGNTFLEWYQQKPGKAPKLLIYKVSNRFSGVPSRFSGSGSGTDFTLTISSLQPEDFATYYCFQGSQFPYTFGQGTKVEIK

SEQ ID NO: 2330 - protein, 11 aa, Artificial Sequence
  Description of Artificial Sequence: Synthetic peptide
QSIVHSVGNTF

SEQ ID NO: 2331 - protein, 3 aa, Artificial Sequence
  Description of Artificial Sequence: Synthetic peptide
KVS

SEQ ID NO: 2332 - protein, 9 aa, Artificial Sequence
  Description of Artificial Sequence: Synthetic peptide
FQGSQFPYT

SEQ ID NO: 2333 - protein, 120 aa, Artificial Sequence
  Description of Artificial Sequence: Synthetic polypeptide
EVQLVESGGGLVQPGGSLRLSCAASGYEFSRSWMNWVRQAPGKGLEWVGRIYPGDGDTNYSGKFKGRFTISADTSKNTAYLQMNSLRAEDTAVYYCARDGSSWDWYFDVWGQGTLVTVSS

SEQ ID NO: 2334 - protein, 8 aa, Artificial Sequence
  Description of Artificial Sequence: Synthetic peptide
GYEFSRSW

SEQ ID NO: 2335 - protein, 8 aa, Artificial Sequence
  Description of Artificial Sequence: Synthetic peptide
IYPGDGDT

SEQ ID NO: 2336 - protein, 13 aa, Artificial Sequence
  Description of Artificial Sequence: Synthetic peptide
ARDGSSWDWYFDV

SEQ ID NO: 2337 - protein, 108 aa, Artificial Sequence [sequence omitted]

SEQ ID NO: 2338 - protein, 7 aa, Artificial Sequence
  Description of Artificial Sequence: Synthetic peptide
QSVSSSF

SEQ ID NO: 2339 - protein, 3 aa, Artificial Sequence
  Description of Artificial Sequence: Synthetic peptide
YAS

SEQ ID NO: 2340 - protein, 9 aa, Artificial Sequence
  Description of Artificial Sequence: Synthetic peptide
QQTGRIPPT

SEQ ID NO: 2341 - protein, 116 aa, Artificial Sequence [sequence omitted]

SEQ ID NO: 2342 - protein, 8 aa, Artificial Sequence
  Description of Artificial Sequence: Synthetic peptide
GFTFSSFS

SEQ ID NO: 2343 - protein, 8 aa, Artificial Sequence
  Description of Artificial Sequence: Synthetic peptide
ISGSSGTT

SEQ ID NO: 2344 - protein, 9 aa, Artificial Sequence
  Description of Artificial Sequence: Synthetic peptide
AKPFPYFDY

SEQ ID NO: 2345 - protein, 106 aa, Artificial Sequence [sequence omitted]

SEQ ID NO: 2346 - protein, 5 aa, Artificial Sequence
  Description of Artificial Sequence: Synthetic peptide
SSVSY

SEQ ID NO: 2347 - protein, 3 aa, Artificial Sequence
  Description of Artificial Sequence: Synthetic peptide
DTS

SEQ ID NO: 2348 - protein, 9 aa, Artificial Sequence
  Description of Artificial Sequence: Synthetic peptide
QQWSSNPPT

SEQ ID NO: 2349 - protein, 120 aa, Artificial Sequence [sequence omitted]

SEQ ID NO: 2350 - protein, 8 aa, Artificial Sequence
  Description of Artificial Sequence: Synthetic peptide
GYTFISYT

SEQ ID NO: 2351 - protein, 8 aa, Artificial Sequence
  Description of Artificial Sequence: Synthetic peptide
INPRSGYT

SEQ ID NO: 2352 - protein, 13 aa, Artificial Sequence
  Description of Artificial Sequence: Synthetic peptide
ARSAYYDYDGFAY

SEQ ID NO: 2353 - protein, 487 aa, Artificial Sequence
  Description of Artificial Sequence: Synthetic polypeptide
DIQMTQSPSSLSASVGDRVTITCRASQDVNTAVAWYQQKPGKAPKLLIYSASFLYSGVPSRFSGSRSGTDFTLTISSLQPEDFATYYCQQHYTTPPTFGQGTKVEIKRTVAAPSVFIFPPSDEQLKSGTASVVCLLNNFYPREAKVQWKVDNALQSGNSQESVTEQDSKDSTYSLSSTLTLSKADYEKHKVYACEVTHQGLSSPVTKSFNRGECTSGGGGSGGGGSGGGGSQVQLVQSGGGVVQPGRSLRLSCKASGYTFTRYTMHWVRQAPGKCLEWIGYINPSRGYTNYNQKFKDRFTISRDNSKNTAFLQMDSLRPEDTGVYFCARYYDDHYSLDYWGQGTPVTVSSGGGGSGGGGSGGGGSGGGGSGGGGSGGGGSDIQMTQSPSSLSASVGDRVTITCSASSSVSYMNWYQQTPGKAPKRWIYDTSKLASGVPSRFSGSGSGTDYTFTISSLQPEDIATYYCQQWSSNPFTFGCGTKLQITR

SEQ ID NO: 2354 - protein, 450 aa, Artificial Sequence
  Description of Artificial Sequence: Synthetic polypeptide
EVQLVESGGGLVQPGGSLRLSCAASGFNIKDTYIHWVRQAPGKGLEWVARIYPTNGYTRYADSVKGRFTISADTSKNTAYLQMNSLRAEDTAVYYCSRWGGDGFYAMDYWGQGTLVTVSSASTKGPSVFPLAPSSKSTSGGTAALGCLVKDYFPEPVTVSWNSGALTSGVHTFPAVLQSSGLYSLSSVVTVPSSSLGTQTYICNVNHKPSNTKVDKRVEPKSCDKTHTCPPCPAPELLGGPSVFLFPPKPKDTLMISRTPEVTCVVVDVSHEDPEVKFNWYVDGVEVHNAKTKPREEQYASTYRVVSVLTVLHQDWLNGKEYKCAVSNKALPAPIEKTISKAKGQPREPQVYTLPPSRDELTKNQVSLTCLVKGFYPSDIAVEWESNGQPENNYKTTPPVLDSDGSFFLYSKLTVDKSRWQQGNVFSCSVMHEALHNHYTQKSLSLSPGK

SEQ ID NO: 2355 - protein, 450 aa, Artificial Sequence
  Description of Artificial Sequence: Synthetic polypeptide
EVQLVESGGGLVQPGGSLRLSCAASGFNIKDTYIHWVRQAPGKGLEWVARIYPTNGYTRYADSVKGRFTISADTSKNTAYLQMNSLRAEDTAVYYCSRWGGDGFYAMDYWGQGTLVTVSSASTKGPSVFPLAPSSKSTSGGTAALGCLVKDYFPEPVTVSWNSGALTSGVHTFPAVLQSSGLYSLSSVVTVPSSSLGTQTYICNVNHKPSNTKVDKRVEPKSCDKTHTCPPCPAPELLGGPSVFLFPPKPKDTLMISRTPEVTCVVVDVSHEDPEVKFNWYVDGVEVHNAKTKPREEQYASTYRVVSVLTVLHQDWLNGKEYKCAVSNKALPAPIEKTISKAKGQPREPQVYTLPPSRDELTKNQVSLTCLVKGFYPSDIAVEWESNGQPENNYKTTPPVLDSDGSFLLYSKLTVDKSRWQQGNVFSCSVMHEALHNHYTQKSLSLSPGK

SEQ ID NO: 2356 - protein, 450 aa, Artificial Sequence
  Description of Artificial Sequence: Synthetic polypeptide
EVQLVESGGGLVQPGGSLRLSCAASGFNIKDTYIHWVRQAPGKGLEWVARIYPTNGYTRYADSVKGRFTISADTSKNTAYLQMNSLRAEDTAVYYCSRWGGDGFYAMDYWGQGTLVTVSSASTKGPSVFPLAPSSKSTSGGTAALGCLVKDYFPEPVTVSWNSGALTSGVHTFPAVLQSSGLYSLSSVVTVPSSSLGTQTYICNVNHKPSNTKVDKRVEPKSCDKTHTCPPCPAPELLGGPSVFLFPPKPKDTLMISRTPEVTCVVVDVSHEDPEVKFNWYVDGVEVHNAKTKPREEQYASTYRVVSVLTVLHQDWLNGKEYKCAVSNKALPAPIEKTISKAKGQPREPQVYTLPPSRDELTKNQVSLTCLVKGFYPSDIAVEWESNGQPENNYKTTPPVLDSDGSFFLYSRLTVDKSRWQQGNVFSCSVMHEALHNHYTQKSLSLSPGK

SEQ ID NO: 2357 - protein, 484 aa, Artificial Sequence
  Description of Artificial Sequence: Synthetic polypeptide
EIVMTQTPATLSVSAGERVTITCKASQSVSNDVTWYQQKPGQAPRLLIYSASNRYSGVPARFSGSGYGTEFTFTISSVQSEDFAVYFCQQDYSSFGQGTKLEIKRTVAAPSVFIFPPSDEQLKSGTASVVCLLNNFYPREAKVQWKVDNALQSGNSQESVTEQDSKDSTYSLSSTLTLSKADYEKHKVYACEVTHQGLSSPVTKSFNRGECTSGGGGSGGGGSGGGGSQVQLVQSGGGVVQPGRSLRLSCKASGYTFTRYTMHWVRQAPGKCLEWIGYINPSRGYTNYNQKFKDRFTISRDNSKNTAFLQMDSLRPEDTGVYFCARYYDDHYSLDYWGQGTPVTVSSGGGGSGGGGSGGGGSGGGGSGGGGSGGGGSDIQMTQSPSSLSASVGDRVTITCSASSSVSYMNWYQQTPGKAPKRWIYDTSKLASGVPSRFSGSGSGTDYTFTISSLQPEDIATYYCQQWSSNPFTFGCGTKLQITR

SEQ ID NO: 2358 - protein, 211 aa, Artificial Sequence
  Description of Artificial Sequence: Synthetic polypeptide
EIVMTQTPATLSVSAGERVTITCKASQSVSNDVTWYQQKPGQAPRLLIYSASNRYSGVPARFSGSGYGTEFTFTISSVQSEDFAVYFCQQDYSSFGQGTKLEIKRTVAAPSVFIFPPSDEQLKSGTASVVCLLNNFYPREAKVQWKVDNALQSGNSQESVTEQDSKDSTYSLSSTLTLSKADYEKHKVYACEVTHQGLSSPVTKSFNRGEC

SEQ ID NO: 2359 - protein, 449 aa, Artificial Sequence
  Description of Artificial Sequence: Synthetic polypeptide
QVQLVESGPGVVQPGRSLRISCAVSGFSVTNYGVHWVRQPPGKGLEWLGVIWAGGITNYNSAFMSRLTISKDNSKNTVYLQMNSLRAEDTAMYYCASRGGHYGYALDYWGQGTLVTVSSASTKGPSVFPLAPSSKSTSGGTAALGCLVKDYFPEPVTVSWNSGALTSGVHTFPAVLQSSGLYSLSSVVTVPSSSLGTQTYICNVNHKPSNTKVDKRVEPKSCDKTHTCPPCPAPELLGGPSVFLFPPKPKDTLMISRTPEVTCVVVDVSHEDPEVKFNWYVDGVEVHNAKTKPREEQYASTYRVVSVLTVLHQDWLNGKEYKCAVSNKALPAPIEKTISKAKGQPREPQVYTLPPSRDELTKNQVSLTCLVKGFYPSDIAVEWESNGQPENNYKTTPPVLDSDGSFFLYSKLTVDKSRWQQGNVFSCSVMHEALHNHYTQKSLSLSPGK

SEQ ID NO: 2360 - protein, 449 aa, Artificial Sequence
  Description of Artificial Sequence: Synthetic polypeptide
QVQLVESGPGVVQPGRSLRISCAVSGFSVTNYGVHWVRQPPGKGLEWLGVIWAGGITNYNSAFMSRLTISKDNSKNTVYLQMNSLRAEDTAMYYCASRGGHYGYALDYWGQGTLVTVSSASTKGPSVFPLAPSSKSTSGGTAALGCLVKDYFPEPVTVSWNSGALTSGVHTFPAVLQSSGLYSLSSVVTVPSSSLGTQTYICNVNHKPSNTKVDKRVEPKSCDKTHTCPPCPAPELLGGPSVFLFPPKPKDTLMISRTPEVTCVVVDVSHEDPEVKFNWYVDGVEVHNAKTKPREEQYASTYRVVSVLTVLHQDWLNGKEYKCAVSNKALPAPIEKTISKAKGQPREPQVYTLPPSRDELTKNQVSLTCLVKGFYPSDIAVEWESNGQPENNYKTTPPVLDSDGSFLLYSKLTVDKSRWQQGNVFSCSVMHEALHNHYTQKSLSLSPGK

SEQ ID NO: 2361 - protein, 449 aa, Artificial Sequence
  Description of Artificial Sequence: Synthetic polypeptide
QVQLVESGPGVVQPGRSLRISCAVSGFSVTNYGVHWVRQPPGKGLEWLGVIWAGGITNYNSAFMSRLTISKDNSKNTVYLQMNSLRAEDTAMYYCASRGGHYGYALDYWGQGTLVTVSSASTKGPSVFPLAPSSKSTSGGTAALGCLVKDYFPEPVTVSWNSGALTSGVHTFPAVLQSSGLYSLSSVVTVPSSSLGTQTYICNVNHKPSNTKVDKRVEPKSCDKTHTCPPCPAPELLGGPSVFLFPPKPKDTLMISRTPEVTCVVVDVSHEDPEVKFNWYVDGVEVHNAKTKPREEQYASTYRVVSVLTVLHQDWLNGKEYKCAVSNKALPAPIEKTISKAKGQPREPQVYTLPPSRDELTKNQVSLTCLVKGFYPSDIAVEWESNGQPENNYKTTPPVLDSDGSFFLYSRLTVDKSRWQQGNVFSCSVMHEALHNHYTQKSLSLSPGK

SEQ ID NO: 2362 - protein, 484 aa, Artificial Sequence
  Description of Artificial Sequence: Synthetic polypeptide
KIVMTQTPATLSVSAGERVTITCKASQSVSNHVTWYQQKPGQAPRLLIYSASNRYSGVPARFSGSGYGTEFTFTISSVQSEDFAVYFCQQDYSSFGQGTKLEIKRTVAAPSVFIFPPSDEQLKSGTASVVCLLNNFYPREAKVQWKVDNALQSGNSQESVTEQDSKDSTYSLSSTLTLSKADYEKHKVYACEVTHQGLSSPVTKSFNRGECTSGGGGSGGGGSGGGGSQVQLVQSGGGVVQPGRSLRLSCKASGYTFTRYTMHWVRQAPGKCLEWIGYINPSRGYTNYNQKFKDRFTISRDNSKNTAFLQMDSLRPEDTGVYFCARYYDDHYSLDYWGQGTPVTVSSGGGGSGGGGSGGGGSGGGGSGGGGSGGGGSDIQMTQSPSSLSASVGDRVTITCSASSSVSYMNWYQQTPGKAPKRWIYDTSKLASGVPSRFSGSGSGTDYTFTISSLQPEDIATYYCQQWSSNPFTFGCGTKLQITR

SEQ ID NO: 2363 - protein, 211 aa, Artificial Sequence
  Description of Artificial Sequence: Synthetic polypeptide
KIVMTQTPATLSVSAGERVTITCKASQSVSNHVTWYQQKPGQAPRLLIYSASNRYSGVPARFSGSGYGTEFTFTISSVQSEDFAVYFCQQDYSSFGQGTKLEIKRTVAAPSVFIFPPSDEQLKSGTASVVCLLNNFYPREAKVQWKVDNALQSGNSQESVTEQDSKDSTYSLSSTLTLSKADYEKHKVYACEVTHQGLSSPVTKSFNRGEC

SEQ ID NO: 2364 - protein, 449 aa, Artificial Sequence; identical to SEQ ID NO: 2359
  Description of Artificial Sequence: Synthetic polypeptide

SEQ ID NO: 2365 - protein, 449 aa, Artificial Sequence; identical to SEQ ID NO: 2360
  Description of Artificial Sequence: Synthetic polypeptide

SEQ ID NO: 2366 - protein, 449 aa, Artificial Sequence; identical to SEQ ID NO: 2361
  Description of Artificial Sequence: Synthetic polypeptide

SEQ ID NO: 2367 - protein, 493 aa, Artificial Sequence
  Description of Artificial Sequence: Synthetic polypeptide
EIVMTQSPATLSVSPGERATLSCRSSQSLVHRNGNTYLHWYLQKPGQSPKLLIHKVSNRFSGVPDRFSGSGSGTDFTLKISRVEAEDLGVYFCSQSTHVPPLTFGAGTKLELKRTVAAPSVFIFPPSDEQLKSGTASVVCLLNNFYPREAKVQWKVDNALQSGNSQESVTEQDSKDSTYSLSSTLTLSKADYEKHKVYACEVTHQGLSSPVTKSFNRGECTSGGGGSGGGGSGGGGSQVQLVQSGGGVVQPGRSLRLSCKASGYTFTRYTMHWVRQAPGKCLEWIGYINPSRGYTNYNQKFKDRFTISRDNSKNTAFLQMDSLRPEDTGVYFCARYYDDHYSLDYWGQGTPVTVSSGGGGSGGGGSGGGGSGGGGSGGGGSGGGGSDIQMTQSPSSLSASVGDRVTITCSASSSVSYMNWYQQTPGKAPKRWIYDTSKLASGVPSRFSGSGSGTDYTFTISSLQPEDIATYYCQQWSSNPFTFGCGTKLQITR

SEQ ID NO: 2368 - protein, 220 aa, Artificial Sequence
  Description of Artificial Sequence: Synthetic polypeptide
EIVMTQSPATLSVSPGERATLSCRSSQSLVHRNGNTYLHWYLQKPGQSPKLLIHKVSNRFSGVPDRFSGSGSGTDFTLKISRVEAEDLGVYFCSQSTHVPPLTFGAGTKLELKRTVAAPSVFIFPPSDEQLKSGTASVVCLLNNFYPREAKVQWKVDNALQSGNSQESVTEQDSKDSTYSLSSTLTLSKADYEKHKVYACEVTHQGLSSPVTKSFNRGEC

SEQ ID NO: 2369 - protein, 443 aa, Artificial Sequence
  Description of Artificial Sequence: Synthetic polypeptide
EVQLLQSGPELEKPGASVMISCKASGSSFTGYNMNWVRQNIGKSLEWIGAIDPYYGGTSYNQKFKGRATLTVDKSSSTAYMHLKSLTSEDSAVYYCVSGMEYWGQGTSVTVSSASTKGPSVFPLAPSSKSTSGGTAALGCLVKDYFPEPVTVSWNSGALTSGVHTFPAVLQSSGLYSLSSVVTVPSSSLGTQTYICNVNHKPSNTKVDKRVEPKSCDKTHTCPPCPAPELLGGPSVFLFPPKPKDTLMISRTPEVTCVVVDVSHEDPEVKFNWYVDGVEVHNAKTKPREEQYASTYRVVSVLTVLHQDWLNGKEYKCAVSNKALPAPIEKTISKAKGQPREPQVYTLPPSRDELTKNQVSLTCLVKGFYPSDIAVEWESNGQPENNYKTTPPVLDSDGSFFLYSKLTVDKSRWQQGNVFSCSVMHEALHNHYTQKSLSLSPGK

SEQ ID NO: 2370 - protein, 443 aa, Artificial Sequence
  Description of Artificial Sequence: Synthetic polypeptide
EVQLLQSGPELEKPGASVMISCKASGSSFTGYNMNWVRQNIGKSLEWIGAIDPYYGGTSYNQKFKGRATLTVDKSSSTAYMHLKSLTSEDSAVYYCVSGMEYWGQGTSVTVSSASTKGPSVFPLAPSSKSTSGGTAALGCLVKDYFPEPVTVSWNSGALTSGVHTFPAVLQSSGLYSLSSVVTVPSSSLGTQTYICNVNHKPSNTKVDKRVEPKSCDKTHTCPPCPAPELLGGPSVFLFPPKPKDTLMISRTPEVTCVVVDVSHEDPEVKFNWYVDGVEVHNAKTKPREEQYASTYRVVSVLTVLHQDWLNGKEYKCAVSNKALPAPIEKTISKAKGQPREPQVYTLPPSRDELTKNQVSLTCLVKGFYPSDIAVEWESNGQPENNYKTTPPVLDSDGSFLLYSKLTVDKSRWQQGNVFSCSVMHEALHNHYTQKSLSLSPGK

SEQ ID NO: 2371 - protein, 443 aa, Artificial Sequence
  Description of Artificial Sequence: Synthetic polypeptide
EVQLLQSGPELEKPGASVMISCKASGSSFTGYNMNWVRQNIGKSLEWIGAIDPYYGGTSYNQKFKGRATLTVDKSSSTAYMHLKSLTSEDSAVYYCVSGMEYWGQGTSVTVSSASTKGPSVFPLAPSSKSTSGGTAALGCLVKDYFPEPVTVSWNSGALTSGVHTFPAVLQSSGLYSLSSVVTVPSSSLGTQTYICNVNHKPSNTKVDKRVEPKSCDKTHTCPPCPAPELLGGPSVFLFPPKPKDTLMISRTPEVTCVVVDVSHEDPEVKFNWYVDGVEVHNAKTKPREEQYASTYRVVSVLTVLHQDWLNGKEYKCAVSNKALPAPIEKTISKAKGQPREPQVYTLPPSRDELTKNQVSLTCLVKGFYPSDIAVEWESNGQPENNYKTTPPVLDSDGSFFLYSRLTVDKSRWQQGNVFSCSVMHEALHNHYTQKSLSLSPGK

SEQ ID NO: 2372 - protein, 491 aa, Artificial Sequence
  Description of Artificial Sequence: Synthetic polypeptide
EIVLTQSPATLSVSLGERATISCRASESVDNYGISFMNWFQQKPGQPPRLLIYAASNQGSGVPARFSGSGPGTDFTLTISSMEPEDFAMYFCQQSKEVPWTFGGGTKLEIKRTVAAPSVFIFPPSDEQLKSGTASVVCLLNNFYPREAKVQWKVDNALQSGNSQESVTEQDSKDSTYSLSSTLTLSKADYEKHKVYACEVTHQGLSSPVTKSFNRGECTSGGGGSGGGGSGGGGSQVQLVQSGGGVVQPGRSLRLSCKASGYTFTRYTMHWVRQAPGKCLEWIGYINPSRGYTNYNQKFKDRFTISRDNSKNTAFLQMDSLRPEDTGVYFCARYYDDHYSLDYWGQGTPVTVSSGGGGSGGGGSGGGGSGGGGSGGGGSGGGGSDIQMTQSPSSLSASVGDRVTITCSASSSVSYMNWYQQTPGKAPKRWIYDTSKLASGVPSRFSGSGSGTDYTFTISSLQPEDIATYYCQQWSSNPFTFGCGTKLQITR

SEQ ID NO: 2373 - protein, 218 aa, Artificial Sequence
  Description of Artificial Sequence: Synthetic polypeptide
EIVLTQSPATLSVSLGERATISCRASESVDNYGISFMNWFQQKPGQPPRLLIYAASNQGSGVPARFSGSGPGTDFTLTISSMEPEDFAMYFCQQSKEVPWTFGGGTKLEIKRTVAAPSVFIFPPSDEQLKSGTASVVCLLNNFYPREAKVQWKVDNALQSGNSQESVTEQDSKDSTYSLSSTLTLSKADYEKHKVYACEVTHQGLSSPVTKSFNRGEC

SEQ ID NO: 2374 - protein, 446 aa, Artificial Sequence
  Description of Artificial Sequence: Synthetic polypeptide
EVQLVQSGPEVVKPGASVKISCKASGYTFTDYNMHWVRQAHGQSLEWIGYIYPYNGGTGYNQKFKSRATLTVDNSASTAYMEVSSLRSEDTAVYYCARGRPAMDYWGQGTLVTVSSASTKGPSVFPLAPSSKSTSGGTAALGCLVKDYFPEPVTVSWNSGALTSGVHTFPAVLQSSGLYSLSSVVTVPSSSLGTQTYICNVNHKPSNTKVDKRVEPKSCDKTHTCPPCPAPELLGGPSVFLFPPKPKDTLMISRTPEVTCVVVDVSHEDPEVKFNWYVDGVEVHNAKTKPREEQYASTYRVVSVLTVLHQDWLNGKEYKCAVSNKALPAPIEKTISKAKGQPREPQVYTLPPSRDELTKNQVSLTCLVKGFYPSDIAVEWESNGQPENNYKTTPPVLDSDGSFFLYSKLTVDKSRWQQGNVFSCSVMHEALHNHYTQKSLSLSPGK

SEQ ID NO: 2375 - protein, 446 aa, Artificial Sequence
  Description of Artificial Sequence: Synthetic polypeptide
EVQLVQSGPEVVKPGASVKISCKASGYTFTDYNMHWVRQAHGQSLEWIGYIYPYNGGTGYNQKFKSRATLTVDNSASTAYMEVSSLRSEDTAVYYCARGRPAMDYWGQGTLVTVSSASTKGPSVFPLAPSSKSTSGGTAALGCLVKDYFPEPVTVSWNSGALTSGVHTFPAVLQSSGLYSLSSVVTVPSSSLGTQTYICNVNHKPSNTKVDKRVEPKSCDKTHTCPPCPAPELLGGPSVFLFPPKPKDTLMISRTPEVTCVVVDVSHEDPEVKFNWYVDGVEVHNAKTKPREEQYASTYRVVSVLTVLHQDWLNGKEYKCAVSNKALPAPIEKTISKAKGQPREPQVYTLPPSRDELTKNQVSLTCLVKGFYPSDIAVEWESNGQPENNYKTTPPVLDSDGSFLLYSKLTVDKSRWQQGNVFSCSVMHEALHNHYTQKSLSLSPGK

SEQ ID NO: 2376 - protein, 446 aa, Artificial Sequence
  Description of Artificial Sequence: Synthetic polypeptide
EVQLVQSGPEVVKPGASVKISCKASGYTFTDYNMHWVRQAHGQSLEWIGYIYPYNGGTGYNQKFKSRATLTVDNSASTAYMEVSSLRSEDTAVYYCARGRPAMDYWGQGTLVTVSSASTKGPSVFPLAPSSKSTSGGTAALGCLVKDYFPEPVTVSWNSGALTSGVHTFPAVLQSSGLYSLSSVVTVPSSSLGTQTYICNVNHKPSNTKVDKRVEPKSCDKTHTCPPCPAPELLGGPSVFLFPPKPKDTLMISRTPEVTCVVVDVSHEDPEVKFNWYVDGVEVHNAKTKPREEQYASTYRVVSVLTVLHQDWLNGKEYKCAVSNKALPAPIEKTISKAKGQPREPQVYTLPPSRDELTKNQVSLTCLVKGFYPSDIAVEWESNGQPENNYKTTPPVLDSDGSFFLYSRLTVDKSRWQQGNVFSCSVMHEALHNHYTQKSLSLSPGK

SEQ ID NO: 2377 - protein, 213 aa, Artificial Sequence
  Description of Artificial Sequence: Synthetic polypeptide
DIQMTQSPSSLSASVGDRVTITCSASSSVSYMNWYQQTPGKAPKRWIYDTSKLASGVPSRFSGSGSGTDYTFTISSLQPEDIATYYCQQWSSNPFTFGQGTKLQITRTVAAPSVFIFPPSDEQLKSGTASVVCLLNNFYPREAKVQWKVDNALQSGNSQESVTEQDSKDSTYSLSSTLTLSKADYEKHKVYACEVTHQGLSSPVTKSFNRGEC

SEQ ID NO: 2378 - protein, 449 aa, Artificial Sequence
  Description of Artificial Sequence: Synthetic polypeptide
QVQLVQSGGGVVQPGRSLRLSCKASGYTFTRYTMHWVRQAPGKGLEWIGYINPSRGYTNYNQKFKDRFTISRDNSKNTAFLQMDSLRPEDTGVYFCARYYDDHYSLDYWGQGTPVTVSSASTKGPSVFPLAPSSKSTSGGTAALGCLVKDYFPEPVTVSWNSGALTSGVHTFPAVLQSSGLYSLSSVVTVPSSSLGTQTYICNVNHKPSNTKVDKRVEPKSCDKTHTCPPCPAPELLGGPSVFLFPPKPKDTLMISRTPEVTCVVVDVSHEDPEVKFNWYVDGVEVHNAKTKPREEQYASTYRVVSVLTVLHQDWLNGKEYKCAVSNKALPAPIEKTISKAKGQPREPQVYTLPPSRDELTKNQVSLTCLVKGFYPSDIAVEWESNGQPENNYKTTPPVLDSDGSFFLYSKLTVDKSRWQQGNVFSCSVMHEALHNHYTQKSLSLSPGK

SEQ ID NO: 2379 - protein, 449 aa, Artificial Sequence
  Description of Artificial Sequence: Synthetic polypeptide
QVQLVQSGGGVVQPGRSLRLSCKASGYTFTRYTMHWVRQAPGKGLEWIGYINPSRGYTNYNQKFKDRFTISRDNSKNTAFLQMDSLRPEDTGVYFCARYYDDHYSLDYWGQGTPVTVSSASTKGPSVFPLAPSSKSTSGGTAALGCLVKDYFPEPVTVSWNSGALTSGVHTFPAVLQSSGLYSLSSVVTVPSSSLGTQTYICNVNHKPSNTKVDKRVEPKSCDKTHTCPPCPAPELLGGPSVFLFPPKPKDTLMISRTPEVTCVVVDVSHEDPEVKFNWYVDGVEVHNAKTKPREEQYASTYRVVSVLTVLHQDWLNGKEYKCAVSNKALPAPIEKTISKAKGQPREPQVYTLPPSRDELTKNQVSLTCLVKGFYPSDIAVEWESNGQPENNYKTTPPVLDSDGSFLLYSKLTVDKSRWQQGNVFSCSVMHEALHNHYTQKSLSLSPGK

SEQ ID NO: 2380 - protein, 449 aa, Artificial Sequence
  Description of Artificial Sequence: Synthetic polypeptide
QVQLVQSGGGVVQPGRSLRLSCKASGYTFTRYTMHWVRQAPGKGLEWIGYINPSRGYTNYNQKFKDRFTISRDNSKNTAFLQMDSLRPEDTGVYFCARYYDDHYSLDYWGQGTPVTVSSASTKGPSVFPLAPSSKSTSGGTAALGCLVKDYFPEPVTVSWNSGALTSGVHTFPAVLQSSGLYSLSSVVTVPSSSLGTQTYICNVNHKPSNTKVDKRVEPKSCDKTHTCPPCPAPELLGGPSVFLFPPKPKDTLMISRTPEVTCVVVDVSHEDPEVKFNWYVDGVEVHNAKTKPREEQYASTYRVVSVLTVLHQDWLNGKEYKCAVSNKALPAPIEKTISKAKGQPREPQVYTLPPSRDELTKNQVSLTCLVKGFYPSDIAVEWESNGQPENNYKTTPPVLDSDGSFFLYSRLTVDKSRWQQGNVFSCSVMHEALHNHYTQKSLSLSPGK

SEQ ID NO: 2381 - protein, 384 aa, Homo sapiens
APTKAPDVFPIISGCRHPKDNSPVVLACLITGYHPTSVTVTWYMGTQSQPQRTFPEIQRRDSYYMTSSQLSTPLQQWRQGEYKCVVQHTASKSKKEIFRWPESPKAQASSVPTAQPQAEGSLAKATTAPATTRNTGRGGEEKKKEKEKEEQEERETKTPECPSHTQPLGVYLLTPAVQDLWLRDKATFTCFVVGSDLKDAHLTWEVAGKVPTGGVEEGLLERHSNGSQSQHSRLTLPRSLWNAGTSVTCTLNHPSLPPQRLMALREPAAQAPVKLSLNLLASSDPPEAASWLLCEVSGFSPPNILLMWLEDQREVNTSGFAPARPPPQPGSTTFWAWSVLRVPAPPSPQPATYTCVVSHEDSRTLLNASRSLEVSYVTDHGPMK

SEQ ID NO: 2382 - protein, 330 aa, Homo sapiens [sequence omitted]

SEQ ID NO: 2383 - protein, 326 aa, Homo sapiens
ASTKGPSVFPLAPCSRSTSESTAALGCLVKDYFPEPVTVSWNSGALTSGVHTFPAVLQSSGLYSLSSVVTVPSSNFGTQTYTCNVDHKPSNTKVDKTVERKCCVECPPCPAPPVAGPSVFLFPPKPKDTLMISRTPEVTCVVVDVSHEDPEVQFNWYVDGVEVHNAKTKPREEQFNSTFRVVSVLTVVHQDWLNGKEYKCKVSNKGLPAPIEKTISKTKGQPREPQVYTLPPSREEMTKNQVSLTCLVKGFYPSDISVEWESNGQPENNYKTTPPMLDSDGSFFLYSKLTVDKSRWQQGNVFSCSVMHEALHNHYTQKSLSLSPGK

SEQ ID NO: 2384 - protein, 377 aa, Homo sapiens
ASTKGPSVFPLAPCSRSTSGGTAALGCLVKDYFPEPVTVSWNSGALTSGVHTFPAVLQSSGLYSLSSVVTVPSSSLGTQTYTCNVNHKPSNTKVDKRVELKTPLGDTTHTCPRCPEPKSCDTPPPCPRCPEPKSCDTPPPCPRCPEPKSCDTPPPCPRCPAPELLGGPSVFLFPPKPKDTLMISRTPEVTCVVVDVSHEDPEVQFKWYVDGVEVHNAKTKPREEQYNSTFRVVSVLTVLHQDWLNGKEYKCKVSNKALPAPIEKTISKTKGQPREPQVYTLPPSREEMTKNQVSLTCLVKGFYPSDIAVEWESSGQPENNYNTTPPMLDSDGSFFLYSKLTVDKSRWQQGNIFSCSVMHEALHNRFTQKSLSLSPGK

SEQ ID NO: 2385 - protein, 452 aa, Homo sapiens
GSASAPTLFPLVSCENSPSDTSSVAVGCLAQDFLPDSITLSWKYKNNSDISSTRGFPSVLRGGKYAATSQVLLPSKDVMQGTDEHVVCKVQHPNGNKEKNVPLPVIAELPPKVSVFVPPRDGFFGNPRKSKLICQATGFSPRQIQVSWLREGKQVGSGVTTDQVQAEAKESGPTTYKVTSTLTIKESDWLGQSMFTCRVDHRGLTFQQNASSMCVPDQDTAIRVFAIPPSFASIFLTKSTKLTCLVTDLTTYDSVTISWTRQNGEAVKTHTNISESHPNATFSAVGEASICEDDWNSGERFTCTVTHTDLPSPLKQTISRPKGVALHRPDVYLLPPAREQLNLRESATITCLVTGFSPADVFVQWMQRGQPLSPEKYVTSAPMPEPQAPGRYFAHSILTVSEEEWNTGETYTCVAHEALPNRVTERTVDKSTGKPTLYNVSLVMSDTAGTCY

SEQ ID NO: 2386 - protein, 327 aa, Homo sapiens
ASTKGPSVFPLAPCSRSTSESTAALGCLVKDYFPEPVTVSWNSGALTSGVHTFPAVLQSSGLYSLSSVVTVPSSSLGTKTYTCNVDHKPSNTKVDKRVESKYGPPCPSCPAPEFLGGPSVFLFPPKPKDTLMISRTPEVTCVVVDVSQEDPEVQFNWYVDGVEVHNAKTKPREEQFNSTYRVVSVLTVLHQDWLNGKEYKCKVSNKGLPSSIEKTISKAKGQPREPQVYTLPPSQEEMTKNQVSLTCLVKGFYPSDIAVEWESNGQPENNYKTTPPVLDSDGSFFLYSRLTVDKSRWQEGNVFSCSVMHEALHNHYTQKSLSLSLGK

SEQ ID NO: 2387 - protein, 353 aa, Homo sapiens
ASPTSPKVFPLSLCSTQPDGNVVIACLVQGFFPQEPLSVTWSESGQGVTARNFPPSQDASGDLYTTSSQLTLPATQCLAGKSVTCHVKHYTNPSQDVTVPCPVPSTPPTPSPSTPPTPSPSCCHPRLSLHRPALEDLLLGSEANLTCTLTGLRDASGVTFTWTPSSGKSAVQGPPERDLCGCYSVSSVLPGCAEPWNHGKTFTCTAAYPESKTPLTATLSKSGNTFRPEVHLLPPPSEELALNELVTLTCLARGFSPKDVLVRWLQGSQELPREKYLTWASRQEPSQGTTTFAVTSILRVAAEDWKKGDTFSCMVGHEALPLAFTQKTIDRLAGKPTHVNVSVVMAEVDGTCY

SEQ ID NO: 2388 - protein, 340 aa, Homo sapiens
ASPTSPKVFPLSLDSTPQDGNVVVACLVQGFFPQEPLSVTWSESGQNVTARNFPPSQDASGDLYTTSSQLTLPATQCPDGKSVTCHVKHYTNPSQDVTVPCPVPPPPPCCHPRLSLHRPALEDLLLGSEANLTCTLTGLRDASGATFTWTPSSGKSAVQGPPERDLCGCYSVSSVLPGCAQPWNHGETFTCTAAHPELKTPLTANITKSGNTFRPEVHLLPPPSEELALNELVTLTCLARGFSPKDVLVRWLQGSQELPREKYLTWASRQEPSQGTTTFAVTSILRVAAEDWKKGDTFSCMVGHEALPLAFTQKTIDRMAGKPTHVNVSVVMAEVDGTCY

SEQ ID NO: 2389 - protein, 106 aa, Homo sapiens
TVAAPSVFIFPPSDEQLKSGTASVVCLLNNFYPREAKVQWKVDNALQSGNSQESVTEQDSKDSTYSLSSTLTLSKADYEKHKVYACEVTHQGLSSPVTKSFNRGEC

SEQ ID NO: 2390 - protein, 106 aa, Artificial Sequence
  Description of Artificial Sequence: Synthetic polypeptide
DIQMTQSPSSLSASVGDRVTITCSASSSVSYMNWYQQTPGKAPKRWIYDTSKLASGVPSRFSGSGSGTDYTFTISSLQPEDIATYYCQQWSSNPFTFGCGTKLQIT

SEQ ID NO: 2391 - protein, 119 aa, Artificial Sequence
  Description of Artificial Sequence: Synthetic polypeptide
QVQLVQSGGGVVQPGRSLRLSCKASGYTFTRYTMHWVRQAPGKCLEWIGYINPSRGYTNYNQKFKDRFTISRDNSKNTAFLQMDSLRPEDTGVYFCARYYDDHYSLDYWGQGTPVTVSS

SEQ ID NO: 2392 - protein, 107 aa, Artificial Sequence
  Description of Artificial Sequence: Synthetic polypeptide
DIQMTQSQSSLSTSVGDRVTITCKASQNVRTVVAWYQQKPGKSPKTLIYLASNRHTGVPSRFSGSGSGTEFTLTISNVQPEDFADYFCLQHWSYPLTFGSGTKLEIK

SEQ ID NO: 2393 - protein, 117 aa, Artificial Sequence
  Description of Artificial Sequence: Synthetic polypeptide
EVQLVESGGGLVKPGGSLRLSCAASGFAFSTYDMSWVRQAPGKRLEWVATISSGGSYTYYLDSVKGRFTISRDNAKNSLYLQMNSLRAEDTAVYYCAPTTVVPFAYWGQGTLVTVSS

SEQ ID NO: 2394 - protein, 111 aa, Artificial Sequence
  Description of Artificial Sequence: Synthetic polypeptide
EIVLTQSPATLSVSLGERATISCRASESVDNYGISFMNWFQQKPGQPPRLLIYAASNQGSGVPARFSGSGPGTDFTLTISSMEPEDFAMYFCQQSKEVPWTFGGGTKLEIK

SEQ ID NO: 2395 - protein, 116 aa, Artificial Sequence
  Description of Artificial Sequence: Synthetic polypeptide
EVQLVQSGPEVVKPGASVKISCKASGYTFTDYNMHWVRQAHGQSLEWIGYIYPYNGGTGYNQKFKSRATLTVDNSASTAYMEVSSLRSEDTAVYYCARGRPAMDYWGQGTLVTVSS

SEQ ID NO: 2396-2499 - skipped (104 entries)

SEQ ID NO: 2500 - protein, 6 aa, Unknown
  Description of Unknown: cleavage site peptide
LVPRGS

SEQ ID NO: 2501 - protein, 4 aa, Unknown
  Description of Unknown: cleavage site peptide
  MOD_RES (2)..(2): Glu or Asp
IXGR

SEQ ID NO: 2502 - protein, 5 aa, Unknown
  Description of Unknown: cleavage site peptide
DDDDK

SEQ ID NO: 2503 - protein, 4 aa, Unknown
  Description of Unknown: cleavage site peptide
  MOD_RES (2)..(3): Any amino acid
RXXR

SEQ ID NO: 2504 - protein, 4 aa, Unknown
  Description of Unknown: cleavage site peptide
  MOD_RES (2)..(2): Any amino acid
  MOD_RES (3)..(3): Lys or Arg
RXXR

SEQ ID NO: 2505 - protein, 7 aa, Unknown
  Description of Unknown: cleavage site peptide
ENLYFQG

SEQ ID NO: 2506 - protein, 15 aa, Artificial Sequence
  Description of Artificial Sequence: Synthetic peptide
GGGGSGGGGSGGGGS

SEQ ID NO: 2507 - protein, 30 aa, Artificial Sequence
  Description of Artificial Sequence: Synthetic polypeptide
GGGGSGGGGSGGGGSGGGGSGGGGSGGGGS

SEQ ID NO: 2508 - protein, 5 aa, Artificial Sequence
  Description of Artificial Sequence: Synthetic peptide
GGGGS

SEQ ID NO: 2509 - protein, 75 aa, Artificial Sequence
  Description of Artificial Sequence: Synthetic polypeptide
  MOD_RES (1)..(75): This sequence may encompass 1-15 "Gly Gly Gly Gly Ser" repeating units
  See specification as filed for detailed description of substitutions and preferred embodiments
GGGGSGGGGSGGGGSGGGGSGGGGSGGGGSGGGGSGGGGSGGGGSGGGGSGGGGSGGGGSGGGGSGGGGSGGGGS

SEQ ID NO: 2510 - protein, 6 aa, Artificial Sequence
  Description of Artificial Sequence: Synthetic 6xHis tag
HHHHHH

1. A heterodimeric multispecific antibody comprising a first polypeptide chain, a second polypeptide chain, a third polypeptide chain and a fourth polypeptide chain, wherein the first and second polypeptide chains are covalently bonded to one another, the second and third polypeptide chains are covalently bonded to one another, and the third and fourth polypeptide chain, and wherein:
a. the first polypeptide chain comprises in the N-terminal to C-terminal direction:
i. a light chain variable domain of a first immunoglobulin (VL-1) that is capable of specifically binding to a first epitope;
ii. a light chain constant domain of the first immunoglobulin (CL-1);
iii. a flexible peptide linker comprising the amino acid sequence (GGGGS)₃ (SEQ ID NO: 2506); and
iv. a light chain variable domain of a second immunoglobulin (VL-2) that is linked to a complementary heavy chain variable domain of the second immunoglobulin (VH-2), or a heavy chain variable domain of a second immunoglobulin (VH-2) that is linked to a complementary light chain variable domain of the second immunoglobulin (VL-2), wherein VL-2 and VH-2 are capable of specifically binding to a second epitope, and are linked together via a flexible peptide linker comprising the amino acid sequence (GGGGS)₆ (SEQ ID NO: 2507) to form a single-chain variable fragment;
b. the second polypeptide comprises in the N-terminal to C-terminal direction:
i. a heavy chain variable domain of the first immunoglobulin (VH-1) that is capable of specifically binding to the first epitope;
ii. a first CH1 domain of the first immunoglobulin (CH1-1); and
iii. a first heterodimerization domain of the first immunoglobulin, wherein the first heterodimerization domain is incapable of forming a stable homodimer with another first heterodimerization domain;
c. the third polypeptide comprises in the N-terminal to C-terminal direction:
i. a heavy chain variable domain of a third immunoglobulin (VH-3) that is capable of specifically binding to a third epitope;
ii. a second CH1 domain of the third immunoglobulin (CH1-3); and
iii. a second heterodimerization domain of the third immunoglobulin, wherein the second heterodimerization domain comprises an amino acid sequence or a nucleic acid sequence that is distinct from the first heterodimerization domain of the first immunoglobulin, wherein the second heterodimerization domain is incapable of forming a stable homodimer with another second heterodimerization domain, and wherein the second heterodimerization domain of the third immunoglobulin is configured to form a heterodimer with the first heterodimerization domain of the first immunoglobulin;
d. the fourth polypeptide comprises in the N-terminal to C-terminal direction:
i. a light chain variable domain of the third immunoglobulin (VL-3) that is capable of specifically binding to the third epitope;
ii. a light chain constant domain of the third immunoglobulin (CL-3);
iii. a flexible peptide linker comprising the amino acid sequence (GGGGS)₃ (SEQ ID NO: 2506); and
iv. a light chain variable domain of a fourth immunoglobulin (VL-4) that is linked to a complementary heavy chain variable domain of the fourth immunoglobulin (VH-4), or a heavy chain variable domain of a fourth immunoglobulin (VH-4) that is linked to a complementary light chain variable domain of the fourth immunoglobulin (VL-4), wherein VL-4 and VH-4 are capable of specifically binding to the second epitope, and are linked together via a flexible peptide linker comprising the amino acid sequence (GGGGS)₆ (SEQ ID NO: 2507) to form a single-chain variable fragment, and
wherein each of VL-1 and VL-3 independently comprises the CDR1 sequence, the CDR2 sequence and the CDR3 sequence of a V_{L} amino acid sequence selected from any one of SEQ ID NOs: 1, 9, 17, 25, 33, 41, 49, 57, 65, 73, 81, 89, 97, 105, 113, 121, 129, 145, 153, 161, 169, 177, 193, 201, 233, 241, 257, 273, 281, 289, 297, 305, 313, 321, 329, 337, 345, 353, 361, 369, 377, 385, 393, 401, 409, 417, 425, 433, 441, 449, 457, 465, 481, 489, 497, 521, 529, 537, 545, 553, 561, 609, 617, 681, 689, 697, 705, 713, 721, 729, 737, 745, 753, 761, 769, 777, 785, 793, 801, 809, 817, 825, 833, 841, 849, 857, 865, 873, 881, 889, 945, 953, 961, 977, 985, 993, 1001, 1009, 1017, 1025, 1033, 1041, 1049, 1065, 1073, 1081, 1089, 1097, 1105, 1113, 1121, 1129, 1137, 1145, 1153, 1161, 1169, 1177, 1185, 1193, 1201, 1209, 1217, 1225, 1233, 1241, 1249, 1257, 1265, 1273, 1281, 1289, 1297, 1305, 1313, 1321, 1329, 1337, 1345, 1353, 1361, 1369, 1377, 1385, 1393, 1401, 1409, 1417, 1425, 1433, 1441, 1449, 1457, 1465, 1473, 1481, 1489, 1497, 1505, 1513, 1521, 1529, 1545, 1553, 1561, 1569, 1577, 1585, 1593, 1601, 1609, 1617, 1625, 1633, 1649, 1657, 1673, 1681, 1689, 1697, 1705, 1713, 1721, 1729, 1737, 1745, 1753, 1761, 1769, 1777, 1785, 1793, 1801, 1809, 1817, 1833, 1841, 1849, 1857, 1865, 1873, 1881, 1889, 1913, 1937, 1945, 1953, 1961, 1969, 1977, 1985, 1993, 2001, 2009, 2017, 2025, 2033, 2041, 2049, 2057, 2065, 2073, 2081, 2089, 2097, 2105, 2113, 2121, 2129, 2137, 2145, 2153, 2161, 2169, 2177, 2185, 2193, 2201, 2209, 2217, 2225, 2233, 2241, 2249, 2257, 2265, 2273, 2281, 2297, 2305, 2313, 2321, 2329, 2337 and 2345; and/or
wherein each of VH-1 and VH-3 independently comprises the CDR1 sequence, the CDR2 sequence and the CDR3 sequence of a V_{H} amino acid sequence selected from any one of SEQ ID NOs: 5, 13, 21, 29, 37, 45, 53, 61, 69, 77, 85, 93, 101, 109, 117, 125, 133, 149, 157, 165, 173, 181, 197, 205, 237, 245, 261, 277, 285, 293, 301, 309, 317, 325, 333, 341, 349, 357, 365, 373, 381, 389, 397, 405, 413, 421, 429, 437, 445, 453, 461, 469, 485, 493, 501, 525, 533, 541, 549, 557, 565, 613, 621, 685, 693, 701, 709, 717, 725, 733, 741, 749, 757, 765, 773, 781, 789, 797, 805, 813, 821, 829, 837, 845, 853, 861, 869, 877, 885, 893, 949, 957, 965, 981, 989, 997, 1005, 1013, 1021, 1029, 1037, 1045, 1053, 1069, 1077, 1085, 1093, 1101, 1109, 1117, 1125, 1133, 1141, 1149, 1157, 1165, 1173, 1181, 1189, 1197, 1205, 1213, 1221, 1229, 1237, 1245, 1253, 1261, 1269, 1277, 1285, 1293, 1301, 1309, 1317, 1325, 1333, 1341, 1349, 1357, 1365, 1373, 1381, 1389, 1397, 1405, 1413, 1421, 1429, 1437, 1445, 1453, 1461, 1469, 1477, 1485, 1493, 1501, 1509, 1517, 1525, 1533, 1549, 1557, 1565, 1573, 1581, 1589, 1597, 1605, 1613, 1621, 1629, 1637, 1653, 1661, 1677, 1685, 1693, 1701, 1709, 1717, 1725, 1733, 1741, 1749, 1757, 1765, 1773, 1781, 1789, 1797, 1805, 1813, 1821, 1837, 1845, 1853, 1861, 1869, 1877, 1885, 1893, 1917, 1941, 1949, 1957, 1965, 1973, 1981, 1989, 1997, 2005, 2013, 2021, 2029, 2037, 2045, 2053, 2061, 2069, 2077, 2085, 2093, 2101, 2109, 2117, 2125, 2133, 2141, 2149, 2157, 2165, 2173, 2181, 2189, 2197, 2205, 2213, 2221, 2229, 2237, 2245, 2253, 2261, 2269, 2277, 2285, 2301, 2309, 2317, 2325, 2333, 2341, and 2349.

2. A heterodimeric multispecific antibody comprising a first polypeptide chain, a second polypeptide chain, a third polypeptide chain and a fourth polypeptide chain, wherein the first and second polypeptide chains are covalently bonded to one another, the second and third polypeptide chains are covalently bonded to one another, and the third and fourth polypeptide chain, and wherein:
a. the first polypeptide chain comprises in the N-terminal to C-terminal direction:
i. a light chain variable domain of a first immunoglobulin (VL-1) that is capable of specifically binding to a first epitope;
ii. a light chain constant domain of the first immunoglobulin (CL-1);
iii. a flexible peptide linker comprising the amino acid sequence (GGGGS)₃ (SEQ ID NO: 2506); and
iv. a light chain variable domain of a second immunoglobulin (VL-2) that is linked to a complementary heavy chain variable domain of the second immunoglobulin (VH-2), or a heavy chain variable domain of a second immunoglobulin (VH-2) that is linked to a complementary light chain variable domain of the second immunoglobulin (VL-2), wherein the VL-2 and VH-2 are capable of specifically binding to a second epitope, and are linked together via a flexible peptide linker comprising the amino acid sequence (GGGGS)₆ (SEQ ID NO: 2507) to form a single-chain variable fragment;
b. the second polypeptide comprises in the N-terminal to C-terminal direction:
i. a heavy chain variable domain of the first immunoglobulin (VH-1) that is capable of specifically binding to the first epitope;
ii. a first CH1 domain of the first immunoglobulin (CH1-1); and
iii. a first heterodimerization domain of the first immunoglobulin, wherein the first heterodimerization domain is incapable of forming a stable homodimer with another first heterodimerization domain;
c. the third polypeptide comprises in the N-terminal to C-terminal direction:
i. a heavy chain variable domain of a third immunoglobulin (VH-3) that is capable of specifically binding to the first epitope;
ii. a second CH1 domain of the third immunoglobulin (CH1-3); and
iii. a second heterodimerization domain of the third immunoglobulin, wherein the second heterodimerization domain comprises an amino acid sequence or a nucleic acid sequence that is distinct from the first heterodimerization domain of the first immunoglobulin, wherein the second heterodimerization domain is incapable of forming a stable homodimer with another second heterodimerization domain, and wherein the second heterodimerization domain of the third immunoglobulin is configured to form a heterodimer with the first heterodimerization domain of the first immunoglobulin;
d. the fourth polypeptide comprises in the N-terminal to C-terminal direction:
i. a light chain variable domain of the third immunoglobulin (VL-3) that is capable of specifically binding to the first epitope;
ii. a light chain constant domain of the third immunoglobulin (CL-3);
iii. a flexible peptide linker comprising the amino acid sequence (GGGGS)₃ (SEQ ID NO: 2506); and
iv. a light chain variable domain of a fourth immunoglobulin (VL-4) that is linked to a complementary heavy chain variable domain of the fourth immunoglobulin (VH-4), or a heavy chain variable domain of a fourth immunoglobulin (VH-4) that is linked to a complementary light chain variable domain of the fourth immunoglobulin (VL-4), wherein the VL-4 and VH-4 are capable of specifically binding to a third epitope, and are linked together via a flexible peptide linker comprising the amino acid sequence (GGGGS)₆ (SEQ ID NO: 2507) to form a single-chain variable fragment, and
wherein each of VL-2 and VL-4 independently comprises the CDR1 sequence, the CDR2 sequence and the CDR3 sequence of a V_{L} amino acid sequence selected from any one of SEQ ID NOs: 17, 25, 33, 41, 121, 137, 169, 177, 185, 193, 201, 209, 217, 225, 233, 241, 249, 257, 265, 321, 329, 337, 393, 401, 409, 473, 481, 489, 497, 505, 513, 545, 553, 561, 569, 577, 585, 593, 601, 625, 633, 641, 649, 657, 665, 673, 681, 689, 697, 705, 713, 721, 729, 737, 745, 753, 761, 769, 785, 793, 801, 809, 817, 849, 857, 865, 873, 881, 889, 897, 905, 913, 921, 929, 937, 945, 969, 977, 1009, 1057, 1537, 1569, 1601, 1641, 1665, 1825, 1865, 1897, 1905, 1913, 1921, 1929, 2265, 2281 2289, 2329, and 2345; and/or
wherein each of V-2 and VH-4 independently comprises the CDR1 sequence, the CDR2 sequence and the CDR3 sequence of a V_{H} amino acid sequence selected from any one of SEQ ID NOs: 21, 29, 37, 45, 125, 141, 173, 181, 189, 197, 205, 213, 221, 229, 237, 245, 253, 261, 269, 325, 333, 341, 397, 405, 413, 477, 485, 493, 501, 509, 517, 549, 557, 565, 573, 581, 589, 597, 605, 629, 637, 645, 653, 661, 669, 677, 685, 693, 701, 709, 717, 725, 733, 741, 749, 757, 765, 773, 789, 797, 805, 813, 821, 853, 861, 869, 877, 885, 893, 901, 909, 917, 925, 933, 941, 949, 973, 981, 1013, 1061, 1541, 1573, 1605, 1645, 1669, 1829, 1869, 1901, 1909, 1917, 1925, 1933, 2269, 2285, 2293, 2333, and 2349.

3. A heterodimeric multispecific antibody comprising a first polypeptide chain, a second polypeptide chain, a third polypeptide chain and a fourth polypeptide chain, wherein the first and second polypeptide chains are covalently bonded to one another, the second and third polypeptide chains are covalently bonded to one another, and the third and fourth polypeptide chain, and wherein:
a. the first polypeptide chain comprises in the N-terminal to C-terminal direction:
i. a light chain variable domain of a first immunoglobulin (VL-1) that is capable of specifically binding to a first epitope;
ii. a light chain constant domain of the first immunoglobulin (CL-1);
iii. a flexible peptide linker comprising the amino acid sequence (GGGGS)₃ (SEQ ID NO: 2506); and
iv. a light chain variable domain of a second immunoglobulin (VL-2) that is linked to a complementary heavy chain variable domain of the second immunoglobulin (VH-2), or a heavy chain variable domain of a second immunoglobulin (VH-2) that is linked to a complementary light chain variable domain of the second immunoglobulin (VL-2), wherein VL-2 and VH-2 are capable of specifically binding to a second epitope, and are linked together via a flexible peptide linker comprising the amino acid sequence (GGGGS)₆ (SEQ ID NO: 2507) to form a single-chain variable fragment;
b. the second polypeptide comprises in the N-terminal to C-terminal direction:
i. a heavy chain variable domain of the first immunoglobulin (VH-1) that is capable of specifically binding to the first epitope;
ii. a first CH1 domain of the first immunoglobulin (CH1-1); and
iii. a first heterodimerization domain of the first immunoglobulin, wherein the first heterodimerization domain is incapable of forming a stable homodimer with another first heterodimerization domain;
c. the third polypeptide comprises in the N-terminal to C-terminal direction:
i. a heavy chain variable domain of a third immunoglobulin (VH-3) that is capable of specifically binding to a third epitope;
ii. a second CH1 domain of the third immunoglobulin (CH1-3); and
iii. a second heterodimerization domain of the third immunoglobulin, wherein the second heterodimerization domain comprises an amino acid sequence or a nucleic acid sequence that is distinct from the first heterodimerization domain of the first immunoglobulin, wherein the second heterodimerization domain is incapable of forming a stable homodimer with another second heterodimerization domain, and wherein the second heterodimerization domain of the third immunoglobulin is configured to form a heterodimer with the first heterodimerization domain of the first immunoglobulin;
d. the fourth polypeptide comprises in the N-terminal to C-terminal direction:
i. a light chain variable domain of the third immunoglobulin (VL-3) that is capable of specifically binding to the third epitope;
ii. a light chain constant domain of the third immunoglobulin (CL-3);
iii. a flexible peptide linker comprising the amino acid sequence (GGGGS)₃ (SEQ ID NO: 2506); and
iv. a light chain variable domain of a fourth immunoglobulin (VL-4) that is linked to a complementary heavy chain variable domain of the fourth immunoglobulin (VH-4), or a heavy chain variable domain of a fourth immunoglobulin (VH-4) that is linked to a complementary light chain variable domain of the fourth immunoglobulin (VL-4), wherein VL-4 and VH-4 are capable of specifically binding to the fourth epitope, and are linked together via a flexible peptide linker comprising the amino acid sequence (GGGGS)₆ (SEQ ID NO: 2507) to form a single-chain variable fragment; and
wherein each of VL-1 and VL-3 independently comprises the CDR1 sequence, the CDR2 sequence and the CDR3 sequence of a V_{L} amino acid sequence selected from any one of SEQ ID NOs: 1, 9, 17, 25, 33, 41, 49, 57, 65, 73, 81, 89, 97, 105, 113, 121, 129, 145, 153, 161, 169, 177, 193, 201, 233, 241, 257, 273, 281, 289, 297, 305, 313, 321, 329, 337, 345, 353, 361, 369, 377, 385, 393, 401, 409, 417, 425, 433, 441, 449, 457, 465, 481, 489, 497, 521, 529, 537, 545, 553, 561, 609, 617, 681, 689, 697, 705, 713, 721, 729, 737, 745, 753, 761, 769, 777, 785, 793, 801, 809, 817, 825, 833, 841, 849, 857, 865, 873, 881, 889, 945, 953, 961, 977, 985, 993, 1001, 1009, 1017, 1025, 1033, 1041, 1049, 1065, 1073, 1081, 1089, 1097, 1105, 1113, 1121, 1129, 1137, 1145, 1153, 1161, 1169, 1177, 1185, 1193, 1201, 1209, 1217, 1225, 1233, 1241, 1249, 1257, 1265, 1273, 1281, 1289, 1297, 1305, 1313, 1321, 1329, 1337, 1345, 1353, 1361, 1369, 1377, 1385, 1393, 1401, 1409, 1417, 1425, 1433, 1441, 1449, 1457, 1465, 1473, 1481, 1489, 1497, 1505, 1513, 1521, 1529, 1545, 1553, 1561, 1569, 1577, 1585, 1593, 1601, 1609, 1617, 1625, 1633, 1649, 1657, 1673, 1681, 1689, 1697, 1705, 1713, 1721, 1729, 1737, 1745, 1753, 1761, 1769, 1777, 1785, 1793, 1801, 1809, 1817, 1833, 1841, 1849, 1857, 1865, 1873, 1881, 1889, 1913, 1937, 1945, 1953, 1961, 1969, 1977, 1985, 1993, 2001, 2009, 2017, 2025, 2033, 2041, 2049, 2057, 2065, 2073, 2081, 2089, 2097, 2105, 2113, 2121, 2129, 2137, 2145, 2153, 2161, 2169, 2177, 2185, 2193, 2201, 2209, 2217, 2225, 2233, 2241, 2249, 2257, 2265, 2273, 2281, 2297, 2305, 2313, 2321, 2329, 2337 and 2345; and/or
wherein each of VH-1 and VH-3 independently comprises the CDR1 sequence, the CDR2 sequence and the CDR3 sequence of a V_{H} amino acid sequence selected from any one of SEQ ID NOs: 5, 13, 21, 29, 37, 45, 53, 61, 69, 77, 85, 93, 101, 109, 117, 125, 133, 149, 157, 165, 173, 181, 197, 205, 237, 245, 261, 277, 285, 293, 301, 309, 317, 325, 333, 341, 349, 357, 365, 373, 381, 389, 397, 405, 413, 421, 429, 437, 445, 453, 461, 469, 485, 493, 501, 525, 533, 541, 549, 557, 565, 613, 621, 685, 693, 701, 709, 717, 725, 733, 741, 749, 757, 765, 773, 781, 789, 797, 805, 813, 821, 829, 837, 845, 853, 861, 869, 877, 885, 893, 949, 957, 965, 981, 989, 997, 1005, 1013, 1021, 1029, 1037, 1045, 1053, 1069, 1077, 1085, 1093, 1101, 1109, 1117, 1125, 1133, 1141, 1149, 1157, 1165, 1173, 1181, 1189, 1197, 1205, 1213, 1221, 1229, 1237, 1245, 1253, 1261, 1269, 1277, 1285, 1293, 1301, 1309, 1317, 1325, 1333, 1341, 1349, 1357, 1365, 1373, 1381, 1389, 1397, 1405, 1413, 1421, 1429, 1437, 1445, 1453, 1461, 1469, 1477, 1485, 1493, 1501, 1509, 1517, 1525, 1533, 1549, 1557, 1565, 1573, 1581, 1589, 1597, 1605, 1613, 1621, 1629, 1637, 1653, 1661, 1677, 1685, 1693, 1701, 1709, 1717, 1725, 1733, 1741, 1749, 1757, 1765, 1773, 1781, 1789, 1797, 1805, 1813, 1821, 1837, 1845, 1853, 1861, 1869, 1877, 1885, 1893, 1917, 1941, 1949, 1957, 1965, 1973, 1981, 1989, 1997, 2005, 2013, 2021, 2029, 2037, 2045, 2053, 2061, 2069, 2077, 2085, 2093, 2101, 2109, 2117, 2125, 2133, 2141, 2149, 2157, 2165, 2173, 2181, 2189, 2197, 2205, 2213, 2221, 2229, 2237, 2245, 2253, 2261, 2269, 2277, 2285, 2301, 2309, 2317, 2325, 2333, 2341, and 2349; and/or
wherein each of VL-2 and VL-4 independently comprises the CDR1 sequence, the CDR2 sequence and the CDR3 sequence of a V_{L} amino acid sequence selected from any one of SEQ ID NOs: 17, 25, 33, 41, 121, 137, 169, 177, 185, 193, 201, 209, 217, 225, 233, 241, 249, 257, 265, 321, 329, 337, 393, 401, 409, 473, 481, 489, 497, 505, 513, 545, 553, 561, 569, 577, 585, 593, 601, 625, 633, 641, 649, 657, 665, 673, 681, 689, 697, 705, 713, 721, 729, 737, 745, 753, 761, 769, 785, 793, 801, 809, 817, 849, 857, 865, 873, 881, 889, 897, 905, 913, 921, 929, 937, 945, 969, 977, 1009, 1057, 1537, 1569, 1601, 1641, 1665, 1825, 1865, 1897, 1905, 1913, 1921, 1929, 2265, 2281 2289, 2329, and 2345; and/or
wherein each of V-2 and VH-4 independently comprises the CDR1 sequence, the CDR2 sequence and the CDR3 sequence of a V_{H} amino acid sequence selected from any one of SEQ ID NOs: 21, 29, 37, 45, 125, 141, 173, 181, 189, 197, 205, 213, 221, 229, 237, 245, 253, 261, 269, 325, 333, 341, 397, 405, 413, 477, 485, 493, 501, 509, 517, 549, 557, 565, 573, 581, 589, 597, 605, 629, 637, 645, 653, 661, 669, 677, 685, 693, 701, 709, 717, 725, 733, 741, 749, 757, 765, 773, 789, 797, 805, 813, 821, 853, 861, 869, 877, 885, 893, 901, 909, 917, 925, 933, 941, 949, 973, 981, 1013, 1061, 1541, 1573, 1605, 1645, 1669, 1829, 1869, 1901, 1909, 1917, 1925, 1933, 2269, 2285, 2293, 2333, and 2349.

4. A heterodimeric multispecific antibody comprising a first polypeptide chain, a second polypeptide chain, a third polypeptide chain and a fourth polypeptide chain, wherein the first and second polypeptide chains are covalently bonded to one another, the second and third polypeptide chains are covalently bonded to one another, and the third and fourth polypeptide chain, and wherein:
a. the first polypeptide chain comprises in the N-terminal to C-terminal direction:
i. a light chain variable domain of a first immunoglobulin (VL-1) that is capable of specifically binding to a first epitope;
ii. a light chain constant domain of the first immunoglobulin (CL-1);
iii. a flexible peptide linker comprising the amino acid sequence (GGGGS)₃ (SEQ ID NO: 2506); and
iv. a light chain variable domain of a second immunoglobulin (VL-2) that is linked to a complementary heavy chain variable domain of the second immunoglobulin (VH-2), or a heavy chain variable domain of a second immunoglobulin (VH-2) that is linked to a complementary light chain variable domain of the second immunoglobulin (VL-2), wherein VL-2 and VH-2 are capable of specifically binding to a second epitope, and are linked together via a flexible peptide linker comprising the amino acid sequence (GGGGS)₆ (SEQ ID NO: 2507) to form a single-chain variable fragment;
b. the second polypeptide comprises in the N-terminal to C-terminal direction:
i. a heavy chain variable domain of the first immunoglobulin (VH-1) that is capable of specifically binding to the first epitope;
ii. a first CH1 domain of the first immunoglobulin (CH1-1); and
iii. a first heterodimerization domain of the first immunoglobulin, wherein the first heterodimerization domain is incapable of forming a stable homodimer with another first heterodimerization domain;
c. the third polypeptide comprises in the N-terminal to C-terminal direction:
i. a heavy chain variable domain of a third immunoglobulin (VH-3) that is capable of specifically binding to the first epitope;
ii. a second CH1 domain of the third immunoglobulin (CH1-3); and
iii. a second heterodimerization domain of the third immunoglobulin, wherein the second heterodimerization domain comprises an amino acid sequence or a nucleic acid sequence that is distinct from the first heterodimerization domain of the first immunoglobulin, wherein the second heterodimerization domain is incapable of forming a stable homodimer with another second heterodimerization domain, and wherein the second heterodimerization domain of the third immunoglobulin is configured to form a heterodimer with the first heterodimerization domain of the first immunoglobulin;
d. the fourth polypeptide comprises in the N-terminal to C-terminal direction:
i. a light chain variable domain of the third immunoglobulin (VL-3) that is capable of specifically binding to the first epitope; and
ii. a light chain constant domain of the third immunoglobulin (CL-3); and wherein VL-2 comprises the CDR1 sequence, the CDR2 sequence and the CDR3 sequence of a V_{L} amino acid sequence selected from any one of SEQ ID NOs: 17, 25, 33, 41, 121, 137, 169, 177, 185, 193, 201, 209, 217, 225, 233, 241, 249, 257, 265, 321, 329, 337, 393, 401, 409, 473, 481, 489, 497, 505, 513, 545, 553, 561, 569, 577, 585, 593, 601, 625, 633, 641, 649, 657, 665, 673, 681, 689, 697, 705, 713, 721, 729, 737, 745, 753, 761, 769, 785, 793, 801, 809, 817, 849, 857, 865, 873, 881, 889, 897, 905, 913, 921, 929, 937, 945, 969, 977, 1009, 1057, 1537, 1569, 1601, 1641, 1665, 1825, 1865, 1897, 1905, 1913, 1921, 1929, 2265, 2281 2289, 2329, and 2345; and/or
wherein V-2 comprises the CDR1 sequence, the CDR2 sequence and the CDR3 sequence of a VH amino acid sequence selected from any one of SEQ ID NOs: 21, 29, 37, 45, 125, 141, 173, 181, 189, 197, 205, 213, 221, 229, 237, 245, 253, 261, 269, 325, 333, 341, 397, 405, 413, 477, 485, 493, 501, 509, 517, 549, 557, 565, 573, 581, 589, 597, 605, 629, 637, 645, 653, 661, 669, 677, 685, 693, 701, 709, 717, 725, 733, 741, 749, 757, 765, 773, 789, 797, 805, 813, 821, 853, 861, 869, 877, 885, 893, 901, 909, 917, 925, 933, 941, 949, 973, 981, 1013, 1061, 1541, 1573, 1605, 1645, 1669, 1829, 1869, 1901, 1909, 1917, 1925, 1933, 2269, 2285, 2293, 2333, and 2349, optionally wherein both VH-1 and VH-3 comprise the CDR1 sequence, the CDR2 sequence and the CDR3 sequence of a V_{H} amino acid sequence selected from any one of SEQ ID NOs: 5, 13, 21, 29, 37, 45, 53, 61, 69, 77, 85, 93, 101, 109, 117, 125, 133, 149, 157, 165, 173, 181, 197, 205, 237, 245, 261, 277, 285, 293, 301, 309, 317, 325, 333, 341, 349, 357, 365, 373, 381, 389, 397, 405, 413, 421, 429, 437, 445, 453, 461, 469, 485, 493, 501, 525, 533, 541, 549, 557, 565, 613, 621, 685, 693, 701, 709, 717, 725, 733, 741, 749, 757, 765, 773, 781, 789, 797, 805, 813, 821, 829, 837, 845, 853, 861, 869, 877, 885, 893, 949, 957, 965, 981, 989, 997, 1005, 1013, 1021, 1029, 1037, 1045, 1053, 1069, 1077, 1085, 1093, 1101, 1109, 1117, 1125, 1133, 1141, 1149, 1157, 1165, 1173, 1181, 1189, 1197, 1205, 1213, 1221, 1229, 1237, 1245, 1253, 1261, 1269, 1277, 1285, 1293, 1301, 1309, 1317, 1325, 1333, 1341, 1349, 1357, 1365, 1373, 1381, 1389, 1397, 1405, 1413, 1421, 1429, 1437, 1445, 1453, 1461, 1469, 1477, 1485, 1493, 1501, 1509, 1517, 1525, 1533, 1549, 1557, 1565, 1573, 1581, 1589, 1597, 1605, 1613, 1621, 1629, 1637, 1653, 1661, 1677, 1685, 1693, 1701, 1709, 1717, 1725, 1733, 1741, 1749, 1757, 1765, 1773, 1781, 1789, 1797, 1805, 1813, 1821, 1837, 1845, 1853, 1861, 1869, 1877, 1885, 1893, 1917, 1941, 1949, 1957, 1965, 1973, 1981, 1989, 1997, 2005, 2013, 2021, 2029, 2037, 2045, 2053, 2061, 2069, 2077, 2085, 2093, 2101, 2109, 2117, 2125, 2133, 2141, 2149, 2157, 2165, 2173, 2181, 2189, 2197, 2205, 2213, 2221, 2229, 2237, 2245, 2253, 2261, 2269, 2277, 2285, 2301, 2309, 2317, 2325, 2333, 2341, and 2349; and/or
wherein both VL-1 and VL-3 comprise the CDR1 sequence, the CDR2 sequence and the CDR3 sequence of a V_{L} amino acid sequence selected from any one of SEQ ID NOs: 1, 9, 17, 25, 33, 41, 49, 57, 65, 73, 81, 89, 97, 105, 113, 121, 129, 145, 153, 161, 169, 177, 193, 201, 233, 241, 257, 273, 281, 289, 297, 305, 313, 321, 329, 337, 345, 353, 361, 369, 377, 385, 393, 401, 409, 417, 425, 433, 441, 449, 457, 465, 481, 489, 497, 521, 529, 537, 545, 553, 561, 609, 617, 681, 689, 697, 705, 713, 721, 729, 737, 745, 753, 761, 769, 777, 785, 793, 801, 809, 817, 825, 833, 841, 849, 857, 865, 873, 881, 889, 945, 953, 961, 977, 985, 993, 1001, 1009, 1017, 1025, 1033, 1041, 1049, 1065, 1073, 1081, 1089, 1097, 1105, 1113, 1121, 1129, 1137, 1145, 1153, 1161, 1169, 1177, 1185, 1193, 1201, 1209, 1217, 1225, 1233, 1241, 1249, 1257, 1265, 1273, 1281, 1289, 1297, 1305, 1313, 1321, 1329, 1337, 1345, 1353, 1361, 1369, 1377, 1385, 1393, 1401, 1409, 1417, 1425, 1433, 1441, 1449, 1457, 1465, 1473, 1481, 1489, 1497, 1505, 1513, 1521, 1529, 1545, 1553, 1561, 1569, 1577, 1585, 1593, 1601, 1609, 1617, 1625, 1633, 1649, 1657, 1673, 1681, 1689, 1697, 1705, 1713, 1721, 1729, 1737, 1745, 1753, 1761, 1769, 1777, 1785, 1793, 1801, 1809, 1817, 1833, 1841, 1849, 1857, 1865, 1873, 1881, 1889, 1913, 1937, 1945, 1953, 1961, 1969, 1977, 1985, 1993, 2001, 2009, 2017, 2025, 2033, 2041, 2049, 2057, 2065, 2073, 2081, 2089, 2097, 2105, 2113, 2121, 2129, 2137, 2145, 2153, 2161, 2169, 2177, 2185, 2193, 2201, 2209, 2217, 2225, 2233, 2241, 2249, 2257, 2265, 2273, 2281, 2297, 2305, 2313, 2321, 2329, 2337 and 2345.

5. (canceled)

6. A heterodimeric multispecific antibody comprising a first polypeptide chain, a second polypeptide chain, a third polypeptide chain and a fourth polypeptide chain, wherein the first and second polypeptide chains are covalently bonded to one another, the second and third polypeptide chains are covalently bonded to one another, and the third and fourth polypeptide chain, and wherein:
a. the first polypeptide chain comprises in the N-terminal to C-terminal direction:
i. a light chain variable domain of a first immunoglobulin (VL-1) that is capable of specifically binding to a first epitope;
ii. a light chain constant domain of the first immunoglobulin (CL-1);
iii. a flexible peptide linker comprising the amino acid sequence (GGGGS)₃ (SEQ ID NO: 2506); and
iv. a light chain variable domain of a second immunoglobulin (VL-2) that is linked to a complementary heavy chain variable domain of the second immunoglobulin (VH-2), or a heavy chain variable domain of a second immunoglobulin (VH-2) that is linked to a complementary light chain variable domain of the second immunoglobulin (VL-2), wherein VL-2 and VH-2 are capable of specifically binding to a second epitope, and are linked together via a flexible peptide linker comprising the amino acid sequence (GGGGS)₆ (SEQ ID NO: 2507) to form a single-chain variable fragment;
b. the second polypeptide comprises in the N-terminal to C-terminal direction:
i. a heavy chain variable domain of the first immunoglobulin (VH-1) that is capable of specifically binding to the first epitope;
ii. a first CH1 domain of the first immunoglobulin (CH1-1); and
iii. a first heterodimerization domain of the first immunoglobulin, wherein the first heterodimerization domain is incapable of forming a stable homodimer with another first heterodimerization domain;
c. the third polypeptide comprises in the N-terminal to C-terminal direction:
i. a heavy chain variable domain of a third immunoglobulin (VH-3) that is capable of specifically binding to a third epitope;
ii. a second CH1 domain of the third immunoglobulin (CH1-3); and
iii. a second heterodimerization domain of the third immunoglobulin, wherein the second heterodimerization domain comprises an amino acid sequence or a nucleic acid sequence that is distinct from the first heterodimerization domain of the first immunoglobulin, wherein the second heterodimerization domain is incapable of forming a stable homodimer with another second heterodimerization domain, and wherein the second heterodimerization domain of the third immunoglobulin is configured to form a heterodimer with the first heterodimerization domain of the first immunoglobulin;
d. the fourth polypeptide comprises in the N-terminal to C-terminal direction:
i. a light chain variable domain of the third immunoglobulin (VL-3) that is capable of specifically binding to the third epitope; and
ii. a light chain constant domain of the third immunoglobulin (CL-3); and
wherein each of VL-1 and VL-3 independently comprises the CDR1 sequence, the CDR2 sequence and the CDR3 sequence of a V_{L} amino acid sequence selected from any one of SEQ ID NOs: 1, 9, 17, 25, 33, 41, 49, 57, 65, 73, 81, 89, 97, 105, 113, 121, 129, 145, 153, 161, 169, 177, 193, 201, 233, 241, 257, 273, 281, 289, 297, 305, 313, 321, 329, 337, 345, 353, 361, 369, 377, 385, 393, 401, 409, 417, 425, 433, 441, 449, 457, 465, 481, 489, 497, 521, 529, 537, 545, 553, 561, 609, 617, 681, 689, 697, 705, 713, 721, 729, 737, 745, 753, 761, 769, 777, 785, 793, 801, 809, 817, 825, 833, 841, 849, 857, 865, 873, 881, 889, 945, 953, 961, 977, 985, 993, 1001, 1009, 1017, 1025, 1033, 1041, 1049, 1065, 1073, 1081, 1089, 1097, 1105, 1113, 1121, 1129, 1137, 1145, 1153, 1161, 1169, 1177, 1185, 1193, 1201, 1209, 1217, 1225, 1233, 1241, 1249, 1257, 1265, 1273, 1281, 1289, 1297, 1305, 1313, 1321, 1329, 1337, 1345, 1353, 1361, 1369, 1377, 1385, 1393, 1401, 1409, 1417, 1425, 1433, 1441, 1449, 1457, 1465, 1473, 1481, 1489, 1497, 1505, 1513, 1521, 1529, 1545, 1553, 1561, 1569, 1577, 1585, 1593, 1601, 1609, 1617, 1625, 1633, 1649, 1657, 1673, 1681, 1689, 1697, 1705, 1713, 1721, 1729, 1737, 1745, 1753, 1761, 1769, 1777, 1785, 1793, 1801, 1809, 1817, 1833, 1841, 1849, 1857, 1865, 1873, 1881, 1889, 1913, 1937, 1945, 1953, 1961, 1969, 1977, 1985, 1993, 2001, 2009, 2017, 2025, 2033, 2041, 2049, 2057, 2065, 2073, 2081, 2089, 2097, 2105, 2113, 2121, 2129, 2137, 2145, 2153, 2161, 2169, 2177, 2185, 2193, 2201, 2209, 2217, 2225, 2233, 2241, 2249, 2257, 2265, 2273, 2281, 2297, 2305, 2313, 2321, 2329, 2337 and 2345; and/or
wherein each of VH-1 and VH-3 independently comprises the CDR1 sequence, the CDR2 sequence and the CDR3 sequence of a V_{H} amino acid sequence selected from any one of SEQ ID NOs: 5, 13, 21, 29, 37, 45, 53, 61, 69, 77, 85, 93, 101, 109, 117, 125, 133, 149, 157, 165, 173, 181, 197, 205, 237, 245, 261, 277, 285, 293, 301, 309, 317, 325, 333, 341, 349, 357, 365, 373, 381, 389, 397, 405, 413, 421, 429, 437, 445, 453, 461, 469, 485, 493, 501, 525, 533, 541, 549, 557, 565, 613, 621, 685, 693, 701, 709, 717, 725, 733, 741, 749, 757, 765, 773, 781, 789, 797, 805, 813, 821, 829, 837, 845, 853, 861, 869, 877, 885, 893, 949, 957, 965, 981, 989, 997, 1005, 1013, 1021, 1029, 1037, 1045, 1053, 1069, 1077, 1085, 1093, 1101, 1109, 1117, 1125, 1133, 1141, 1149, 1157, 1165, 1173, 1181, 1189, 1197, 1205, 1213, 1221, 1229, 1237, 1245, 1253, 1261, 1269, 1277, 1285, 1293, 1301, 1309, 1317, 1325, 1333, 1341, 1349, 1357, 1365, 1373, 1381, 1389, 1397, 1405, 1413, 1421, 1429, 1437, 1445, 1453, 1461, 1469, 1477, 1485, 1493, 1501, 1509, 1517, 1525, 1533, 1549, 1557, 1565, 1573, 1581, 1589, 1597, 1605, 1613, 1621, 1629, 1637, 1653, 1661, 1677, 1685, 1693, 1701, 1709, 1717, 1725, 1733, 1741, 1749, 1757, 1765, 1773, 1781, 1789, 1797, 1805, 1813, 1821, 1837, 1845, 1853, 1861, 1869, 1877, 1885, 1893, 1917, 1941, 1949, 1957, 1965, 1973, 1981, 1989, 1997, 2005, 2013, 2021, 2029, 2037, 2045, 2053, 2061, 2069, 2077, 2085, 2093, 2101, 2109, 2117, 2125, 2133, 2141, 2149, 2157, 2165, 2173, 2181, 2189, 2197, 2205, 2213, 2221, 2229, 2237, 2245, 2253, 2261, 2269, 2277, 2285, 2301, 2309, 2317, 2325, 2333, 2341, and 2349; and/or
wherein VL-2 comprises the CDR1 sequence, the CDR2 sequence and the CDR3 sequence of a V_{L} amino acid sequence selected from any one of SEQ ID NOs: 17, 25, 33, 41, 121, 137, 169, 177, 185, 193, 201, 209, 217, 225, 233, 241, 249, 257, 265, 321, 329, 337, 393, 401, 409, 473, 481, 489, 497, 505, 513, 545, 553, 561, 569, 577, 585, 593, 601, 625, 633, 641, 649, 657, 665, 673, 681, 689, 697, 705, 713, 721, 729, 737, 745, 753, 761, 769, 785, 793, 801, 809, 817, 849, 857, 865, 873, 881, 889, 897, 905, 913, 921, 929, 937, 945, 969, 977, 1009, 1057, 1537, 1569, 1601, 1641, 1665, 1825, 1865, 1897, 1905, 1913, 1921, 1929, 2265, 2281 2289, 2329, and 2345; and/or
wherein V-2 comprises the CDR1 sequence, the CDR2 sequence and the CDR3 sequence of a V_{H} amino acid sequence selected from any one of SEQ ID NOs: 21, 29, 37, 45, 125, 141, 173, 181, 189, 197, 205, 213, 221, 229, 237, 245, 253, 261, 269, 325, 333, 341, 397, 405, 413, 477, 485, 493, 501, 509, 517, 549, 557, 565, 573, 581, 589, 597, 605, 629, 637, 645, 653, 661, 669, 677, 685, 693, 701, 709, 717, 725, 733, 741, 749, 757, 765, 773, 789, 797, 805, 813, 821, 853, 861, 869, 877, 885, 893, 901, 909, 917, 925, 933, 941, 949, 973, 981, 1013, 1061, 1541, 1573, 1605, 1645, 1669, 1829, 1869, 1901, 1909, 1917, 1925, 1933, 2269, 2285, 2293, 2333, and 2349.

7. The heterodimeric multispecific antibody of claim 1, wherein VH-1 or VH-3 comprise a V_{H} amino acid sequence selected from any one of SEQ ID NOs: 5, 13, 21, 29, 37, 45, 53, 61, 69, 77, 85, 93, 101, 109, 117, 125, 133, 149, 157, 165, 173, 181, 197, 205, 237, 245, 261, 277, 285, 293, 301, 309, 317, 325, 333, 341, 349, 357, 365, 373, 381, 389, 397, 405, 413, 421, 429, 437, 445, 453, 461, 469, 485, 493, 501, 525, 533, 541, 549, 557, 565, 613, 621, 685, 693, 701, 709, 717, 725, 733, 741, 749, 757, 765, 773, 781, 789, 797, 805, 813, 821, 829, 837, 845, 853, 861, 869, 877, 885, 893, 949, 957, 965, 981, 989, 997, 1005, 1013, 1021, 1029, 1037, 1045, 1053, 1069, 1077, 1085, 1093, 1101, 1109, 1117, 1125, 1133, 1141, 1149, 1157, 1165, 1173, 1181, 1189, 1197, 1205, 1213, 1221, 1229, 1237, 1245, 1253, 1261, 1269, 1277, 1285, 1293, 1301, 1309, 1317, 1325, 1333, 1341, 1349, 1357, 1365, 1373, 1381, 1389, 1397, 1405, 1413, 1421, 1429, 1437, 1445, 1453, 1461, 1469, 1477, 1485, 1493, 1501, 1509, 1517, 1525, 1533, 1549, 1557, 1565, 1573, 1581, 1589, 1597, 1605, 1613, 1621, 1629, 1637, 1653, 1661, 1677, 1685, 1693, 1701, 1709, 1717, 1725, 1733, 1741, 1749, 1757, 1765, 1773, 1781, 1789, 1797, 1805, 1813, 1821, 1837, 1845, 1853, 1861, 1869, 1877, 1885, 1893, 1917, 1941, 1949, 1957, 1965, 1973, 1981, 1989, 1997, 2005, 2013, 2021, 2029, 2037, 2045, 2053, 2061, 2069, 2077, 2085, 2093, 2101, 2109, 2117, 2125, 2133, 2141, 2149, 2157, 2165, 2173, 2181, 2189, 2197, 2205, 2213, 2221, 2229, 2237, 2245, 2253, 2261, 2269, 2277, 2285, 2301, 2309, 2317, 2325, 2333, 2341, and 2349; and/or
wherein the VL-1 or VL-3 comprise a V_{L} amino acid sequence selected from any one of SEQ ID NOs: 1, 9, 17, 25, 33, 41, 49, 57, 65, 73, 81, 89, 97, 105, 113, 121, 129, 145, 153, 161, 169, 177, 193, 201, 233, 241, 257, 273, 281, 289, 297, 305, 313, 321, 329, 337, 345, 353, 361, 369, 377, 385, 393, 401, 409, 417, 425, 433, 441, 449, 457, 465, 481, 489, 497, 521, 529, 537, 545, 553, 561, 609, 617, 681, 689, 697, 705, 713, 721, 729, 737, 745, 753, 761, 769, 777, 785, 793, 801, 809, 817, 825, 833, 841, 849, 857, 865, 873, 881, 889, 945, 953, 961, 977, 985, 993, 1001, 1009, 1017, 1025, 1033, 1041, 1049, 1065, 1073, 1081, 1089, 1097, 1105, 1113, 1121, 1129, 1137, 1145, 1153, 1161, 1169, 1177, 1185, 1193, 1201, 1209, 1217, 1225, 1233, 1241, 1249, 1257, 1265, 1273, 1281, 1289, 1297, 1305, 1313, 1321, 1329, 1337, 1345, 1353, 1361, 1369, 1377, 1385, 1393, 1401, 1409, 1417, 1425, 1433, 1441, 1449, 1457, 1465, 1473, 1481, 1489, 1497, 1505, 1513, 1521, 1529, 1545, 1553, 1561, 1569, 1577, 1585, 1593, 1601, 1609, 1617, 1625, 1633, 1649, 1657, 1673, 1681, 1689, 1697, 1705, 1713, 1721, 1729, 1737, 1745, 1753, 1761, 1769, 1777, 1785, 1793, 1801, 1809, 1817, 1833, 1841, 1849, 1857, 1865, 1873, 1881, 1889, 1913, 1937, 1945, 1953, 1961, 1969, 1977, 1985, 1993, 2001, 2009, 2017, 2025, 2033, 2041, 2049, 2057, 2065, 2073, 2081, 2089, 2097, 2105, 2113, 2121, 2129, 2137, 2145, 2153, 2161, 2169, 2177, 2185, 2193, 2201, 2209, 2217, 2225, 2233, 2241, 2249, 2257, 2265, 2273, 2281, 2297, 2305, 2313, 2321, 2329, 2337 and 2345, and/or
wherein VH-2 or VH-4 comprise a V_{H} amino acid sequence selected from any one of SEQ ID NOs: 21, 29, 37, 45, 125, 141, 173, 181, 189, 197, 205, 213, 221, 229, 237, 245, 253, 261, 269, 325, 333, 341, 397, 405, 413, 477, 485, 493, 501, 509, 517, 549, 557, 565, 573, 581, 589, 597, 605, 629, 637, 645, 653, 661, 669, 677, 685, 693, 701, 709, 717, 725, 733, 741, 749, 757, 765, 773, 789, 797, 805, 813, 821, 853, 861, 869, 877, 885, 893, 901, 909, 917, 925, 933, 941, 949, 973, 981, 1013, 1061, 1541, 1573, 1605, 1645, 1669, 1829, 1869, 1901, 1909, 1917, 1925, 1933, 2269, 2285, 2293, 2333, and 2349; and/or
wherein VL-2 or VL-4 comprise a V_{L} amino acid sequence selected from any one of SEQ ID NOs: 17, 25, 33, 41, 121, 137, 169, 177, 185, 193, 201, 209, 217, 225, 233, 241, 249, 257, 265, 321, 329, 337, 393, 401, 409, 473, 481, 489, 497, 505, 513, 545, 553, 561, 569, 577, 585, 593, 601, 625, 633, 641, 649, 657, 665, 673, 681, 689, 697, 705, 713, 721, 729, 737, 745, 753, 761, 769, 785, 793, 801, 809, 817, 849, 857, 865, 873, 881, 889, 897, 905, 913, 921, 929, 937, 945, 969, 977, 1009, 1057, 1537, 1569, 1601, 1641, 1665, 1825, 1865, 1897, 1905, 1913, 1921, 1929, 2265, 2281 2289, 2329, and 2345.

8. (canceled)

9. The heterodimeric multispecific antibody of claim 1, wherein each of VL-1 and VH-1 comprise a V_{L} amino acid sequence and a VH amino acid sequence selected from the group consisting of SEQ ID NOs: 1 and 5 respectively; SEQ ID NOs: 9 and 13 respectively; SEQ ID NOs: 17 and 21 respectively; SEQ ID NOs: 25 and 29 respectively; SEQ ID NOs: 33 and 37 respectively; SEQ ID NOs: 41 and 45 respectively; SEQ ID NOs: 49 and 53 respectively; SEQ ID NOs: 57 and 61 respectively; SEQ ID NOs: 73 and 77 respectively; SEQ ID NOs: 89 and 93 respectively; SEQ ID NOs: 97 and 101 respectively; SEQ ID NOs: 105 and 109 respectively; SEQ ID NOs: 113 and 117 respectively; SEQ ID NOs: 121 and 125 respectively; SEQ ID NOs: 129 and 133 respectively; SEQ ID NOs: 145 and 149 respectively; SEQ ID NOs: 161 and 165 respectively; SEQ ID NOs: 169 and 173 respectively; SEQ ID NOs: 177 and 181 respectively; SEQ ID NOs: 193 and 197 respectively; SEQ ID NOs: 201 and 205 respectively; SEQ ID NOs: 233 and 237 respectively; SEQ ID NOs: 241 and 245 respectively; SEQ ID NOs: 257 and 261 respectively; SEQ ID NOs: 273 and 277 respectively; SEQ ID NOs: 281 and 285 respectively; SEQ ID NOs: 289 and 293 respectively; SEQ ID NOs: 297 and 301 respectively; SEQ ID NOs: 305 and 309 respectively; SEQ ID NOs: 313 and 317 respectively; SEQ ID NOs: 321 and 325 respectively; SEQ ID NOs: 329 and 333 respectively; SEQ ID NOs: 337 and 341 respectively; SEQ ID NOs: 345 and 349 respectively; SEQ ID NOs: 353 and 357 respectively; SEQ ID NOs: 361 and 365 respectively; SEQ ID NOs: 369 and 373 respectively; SEQ ID NOs: 377 and 381 respectively; SEQ ID NOs: 385 and 389 respectively; SEQ ID NOs: 393 and 397 respectively; SEQ ID NOs: 401 and 405 respectively; SEQ ID NOs: 409 and 413 respectively; SEQ ID NOs: 417 and 421 respectively; SEQ ID NOs: 425 and 429 respectively; SEQ ID NOs: 433 and 437 respectively; SEQ ID NOs: 441 and 445 respectively; SEQ ID NOs: 449 and 453 respectively; SEQ ID NOs: 457 and 461 respectively; SEQ ID NOs: 465 and 469 respectively; SEQ ID NOs: 481 and 485 respectively; SEQ ID NOs: 489 and 493 respectively; SEQ ID NOs: 497 and 501 respectively; SEQ ID NOs: 521 and 525 respectively; SEQ ID NOs: 529 and 533 respectively; SEQ ID NOs: 537 and 541 respectively; SEQ ID NOs: 545 and 549 respectively; SEQ ID NOs: 553 and 557 respectively; SEQ ID NOs: 561 and 565 respectively; SEQ ID NOs: 609 and 613 respectively; SEQ ID NOs: 617 and 621 respectively; SEQ ID NOs: 681 and 685 respectively; SEQ ID NOs: 689 and 693 respectively; SEQ ID NOs: 697 and 701 respectively; SEQ ID NOs: 705 and 709 respectively; SEQ ID NOs: 713 and 717 respectively; SEQ ID NOs: 721 and 725 respectively; SEQ ID NOs: 729 and 733 respectively; SEQ ID NOs: 737 and 741 respectively; SEQ ID NOs: 745 and 749 respectively; SEQ ID NOs: 753 and 757 respectively; SEQ ID NOs: 761 and 765 respectively; SEQ ID NOs: 769 and 773 respectively; SEQ ID NOs: 785 and 789 respectively; SEQ ID NOs: 793 and 797 respectively; SEQ ID NOs: 801 and 805 respectively; SEQ ID NOs: 809 and 813 respectively; SEQ ID NOs: 817 and 821 respectively; SEQ ID NOs: 825 and 829 respectively; SEQ ID NOs: 833 and 837 respectively; SEQ ID NOs: 841 and 845 respectively; SEQ ID NOs: 849 and 853 respectively; SEQ ID NOs: 857 and 861 respectively; SEQ ID NOs: 865 and 869 respectively; SEQ ID NOs: 873 and 877 respectively; SEQ ID NOs: 881 and 885 respectively; SEQ ID NOs: 889 and 893 respectively; SEQ ID NOs: 945 and 949 respectively; SEQ ID NOs: 953 and 957 respectively; SEQ ID NOs: 961 and 965 respectively; SEQ ID NOs: 977 and 981 respectively; SEQ ID NOs: 985 and 989 respectively; SEQ ID NOs: 993 and 997 respectively; SEQ ID NOs: 1001 and 1005 respectively; SEQ ID NOs: 1009 and 1013 respectively; SEQ ID NOs: 1017 and 1021 respectively; SEQ ID NOs: 1025 and 1029 respectively; SEQ ID NOs: 1033 and 1037 respectively; SEQ ID NOs: 1041 and 1045 respectively; SEQ ID NOs: 1065 and 1069 respectively; SEQ ID NOs: 1073 and 1077 respectively; SEQ ID NOs: 1081 and 1085 respectively; SEQ ID NOs: 1089 and 1093 respectively; SEQ ID NOs: 1097 and 1101 respectively; SEQ ID NOs: 1113 and 1117 respectively; SEQ ID NOs: 1121 and 1125 respectively; SEQ ID NOs: 1129 and 1133 respectively; SEQ ID NOs: 1137 and 1141 respectively; SEQ ID NOs: 1145 and 1149 respectively; SEQ ID NOs: 1153 and 1157 respectively; SEQ ID NOs: 1161 and 1165 respectively; SEQ ID NOs: 1169 and 1173 respectively; SEQ ID NOs: 1185 and 1189 respectively; SEQ ID NOs: 1193 and 1197 respectively; SEQ ID NOs: 1201 and 1205 respectively; SEQ ID NOs: 1209 and 1213 respectively; SEQ ID NOs: 1217 and 1221 respectively; SEQ ID NOs: 1225 and 1229 respectively; SEQ ID NOs: 1233 and 1237 respectively; SEQ ID NOs: 1241 and 1245 respectively; SEQ ID NOs: 1249 and 1253 respectively; SEQ ID NOs: 1257 and 1261 respectively; SEQ ID NOs: 1265 and 1269 respectively; SEQ ID NOs: 1273 and 1277 respectively; SEQ ID NOs: 1281 and 1285 respectively; SEQ ID NOs: 1289 and 1293 respectively; SEQ ID NOs: 1297 and 1301 respectively; SEQ ID NOs: 1305 and 1309 respectively; SEQ ID NOs: 1313 and 1317 respectively; SEQ ID NOs: 1321 and 1325 respectively; SEQ ID NOs: 1329 and 1333 respectively; SEQ ID NOs: 1337 and 1341 respectively; SEQ ID NOs: 1345 and 1349 respectively; SEQ ID NOs: 1353 and 1357 respectively; SEQ ID NOs: 1361 and 1365 respectively; SEQ ID NOs: 1369 and 1373 respectively; SEQ ID NOs: 1377 and 1381 respectively; SEQ ID NOs: 1385 and 1389 respectively; SEQ ID NOs: 1393 and 1397 respectively; SEQ ID NOs: 1401 and 1405 respectively; SEQ ID NOs: 1409 and 1413 respectively; SEQ ID NOs: 1417 and 1421 respectively; SEQ ID NOs: 1433 and 1437 respectively; SEQ ID NOs: 1441 and 1445 respectively; SEQ ID NOs: 1457 and 1461 respectively; SEQ ID NOs: 1465 and 1469 respectively; SEQ ID NOs: 1473 and 1477 respectively; SEQ ID NOs: 1481 and 1485 respectively; SEQ ID NOs: 1489 and 1493 respectively; SEQ ID NOs: 1497 and 1501 respectively; SEQ ID NOs: 1505 and 1509 respectively; SEQ ID NOs: 1513 and 1517 respectively; SEQ ID NOs: 1521 and 1525 respectively; SEQ ID NOs: 1529 and 1533 respectively; SEQ ID NOs: 1545 and 1549 respectively; SEQ ID NOs: 1553 and 1557 respectively; SEQ ID NOs: 1561 and 1565 respectively; SEQ ID NOs: 1569 and 1573 respectively; SEQ ID NOs: 1577 and 1581 respectively; SEQ ID NOs: 1585 and 1589 respectively; SEQ ID NOs: 1593 and 1597 respectively; SEQ ID NOs: 1601 and 1605 respectively; SEQ ID NOs: 1609 and 1613 respectively; SEQ ID NOs: 1617 and 1621 respectively; SEQ ID NOs: 1625 and 1629 respectively; SEQ ID NOs: 1633 and 1637 respectively; SEQ ID NOs: 1649 and 1653 respectively; SEQ ID NOs: 1657 and 1661 respectively; SEQ ID NOs: 1673 and 1677 respectively; SEQ ID NOs: 1681 and 1685 respectively; SEQ ID NOs: 1689 and 1693 respectively; SEQ ID NOs: 1697 and 1701 respectively; SEQ ID NOs: 1705 and 1709 respectively; SEQ ID NOs: 1713 and 1717 respectively; SEQ ID NOs: 1721 and 1725 respectively; SEQ ID NOs: 1729 and 1733 respectively; SEQ ID NOs: 1737 and 1741 respectively; SEQ ID NOs: 1745 and 1749 respectively; SEQ ID NOs: 1753 and 1757 respectively; SEQ ID NOs: 1761 and 1765 respectively; SEQ ID NOs: 1769 and 1773 respectively; SEQ ID NOs: 1777 and 1781 respectively; SEQ ID NOs: 1785 and 1789 respectively; SEQ ID NOs: 1793 and 1797 respectively; SEQ ID NOs: 1801 and 1805 respectively; SEQ ID NOs: 1809 and 1813 respectively; SEQ ID NOs: 1817 and 1821 respectively; SEQ ID NOs: 1833 and 1837 respectively; SEQ ID NOs: 1841 and 1845 respectively; SEQ ID NOs: 1849 and 1853 respectively; SEQ ID NOs: 1857 and 1861 respectively; SEQ ID NOs: 1865 and 1869 respectively; SEQ ID NOs: 1873 and 1877 respectively; SEQ ID NOs: 1881 and 1885 respectively; SEQ ID NOs: 1889 and 1893 respectively; SEQ ID NOs: 1913 and 1917 respectively; SEQ ID NOs: 1937 and 1941 respectively; SEQ ID NOs: 1945 and 1949 respectively; SEQ ID NOs: 1953 and 1957 respectively; SEQ ID NOs: 1961 and 1965 respectively; SEQ ID NOs: 1969 and 1973 respectively; SEQ ID NOs: 1977 and 1981 respectively; SEQ ID NOs: 1985 and 1989 respectively; SEQ ID NOs: 1993 and 1997 respectively; SEQ ID NOs: 2001 and 2005 respectively; SEQ ID NOs: 2009 and 2013 respectively; SEQ ID NOs: 2017 and 2021 respectively; SEQ ID NOs: 2025 and 2029 respectively; SEQ ID NOs: 2033 and 2037 respectively; SEQ ID NOs: 2041 and 2045 respectively; SEQ ID NOs: 2049 and 2053 respectively; SEQ ID NOs: 2057 and 2061 respectively; SEQ ID NOs: 2065 and 2069 respectively; SEQ ID NOs: 2073 and 2077 respectively; SEQ ID NOs: 2081 and 2085 respectively; SEQ ID NOs: 2089 and 2093 respectively; SEQ ID NOs: 2097 and 2101 respectively; SEQ ID NOs: 2105 and 2109 respectively; SEQ ID NOs: 2113 and 2117 respectively; SEQ ID NOs: 2121 and 2125 respectively; SEQ ID NOs: 2129 and 2133 respectively; SEQ ID NOs: 2137 and 2141 respectively; SEQ ID NOs: 2145 and 2149 respectively; SEQ ID NOs: 2153 and 2157 respectively; SEQ ID NOs: 2161 and 2165 respectively; SEQ ID NOs: 2169 and 2173 respectively; SEQ ID NOs: 2177 and 2181 respectively; SEQ ID NOs: 2185 and 2189 respectively; SEQ ID NOs: 2193 and 2197 respectively; SEQ ID NOs: 2201 and 2205 respectively; SEQ ID NOs: 2209 and 2213 respectively; SEQ ID NOs: 2217 and 2221 respectively; SEQ ID NOs: 2225 and 2229 respectively; SEQ ID NOs: 2233 and 2237 respectively; SEQ ID NOs: 2241 and 2245 respectively; SEQ ID NOs: 2249 and 2253 respectively; SEQ ID NOs: 2257 and 2261 respectively; SEQ ID NOs: 2273 and 2277 respectively; SEQ ID NOs: 2281 and 2285 respectively; SEQ ID NOs: 2305 and 2309 respectively; SEQ ID NOs: 2313 and 2317 respectively; SEQ ID NOs: 2321 and 2325 respectively; SEQ ID NOs: 2329 and 2333 respectively; SEQ ID NOs: 2337 and 2341 respectively; and SEQ ID NOs: 2345 and 2349 respectively, or
wherein each of VL-3 and VH-3 comprise a V_{L} amino acid sequence and a V_{H} amino acid sequence selected from the group consisting of SEQ ID NOs: 1 and 5 respectively; SEQ ID NOs: 9 and 13 respectively; SEQ ID NOs: 17 and 21 respectively; SEQ ID NOs: 25 and 29 respectively; SEQ ID NOs: 33 and 37 respectively; SEQ ID NOs: 41 and 45 respectively; SEQ ID NOs: 49 and 53 respectively; SEQ ID NOs: 57 and 61 respectively; SEQ ID NOs: 73 and 77 respectively; SEQ ID NOs: 89 and 93 respectively; SEQ ID NOs: 97 and 101 respectively; SEQ ID NOs: 105 and 109 respectively; SEQ ID NOs: 113 and 117 respectively; SEQ ID NOs: 121 and 125 respectively; SEQ ID NOs: 129 and 133 respectively; SEQ ID NOs: 145 and 149 respectively; SEQ ID NOs: 161 and 165 respectively; SEQ ID NOs: 169 and 173 respectively; SEQ ID NOs: 177 and 181 respectively; SEQ ID NOs: 193 and 197 respectively; SEQ ID NOs: 201 and 205 respectively; SEQ ID NOs: 233 and 237 respectively; SEQ ID NOs: 241 and 245 respectively; SEQ ID NOs: 257 and 261 respectively; SEQ ID NOs: 273 and 277 respectively; SEQ ID NOs: 281 and 285 respectively; SEQ ID NOs: 289 and 293 respectively; SEQ ID NOs: 297 and 301 respectively; SEQ ID NOs: 305 and 309 respectively; SEQ ID NOs: 313 and 317 respectively; SEQ ID NOs: 321 and 325 respectively; SEQ ID NOs: 329 and 333 respectively; SEQ ID NOs: 337 and 341 respectively; SEQ ID NOs: 345 and 349 respectively; SEQ ID NOs: 353 and 357 respectively; SEQ ID NOs: 361 and 365 respectively; SEQ ID NOs: 369 and 373 respectively; SEQ ID NOs: 377 and 381 respectively; SEQ ID NOs: 385 and 389 respectively; SEQ ID NOs: 393 and 397 respectively; SEQ ID NOs: 401 and 405 respectively; SEQ ID NOs: 409 and 413 respectively; SEQ ID NOs: 417 and 421 respectively; SEQ ID NOs: 425 and 429 respectively; SEQ ID NOs: 433 and 437 respectively; SEQ ID NOs: 441 and 445 respectively; SEQ ID NOs: 449 and 453 respectively; SEQ ID NOs: 457 and 461 respectively; SEQ ID NOs: 465 and 469 respectively; SEQ ID NOs: 481 and 485 respectively; SEQ ID NOs: 489 and 493 respectively; SEQ ID NOs: 497 and 501 respectively; SEQ ID NOs: 521 and 525 respectively; SEQ ID NOs: 529 and 533 respectively; SEQ ID NOs: 537 and 541 respectively; SEQ ID NOs: 545 and 549 respectively; SEQ ID NOs: 553 and 557 respectively; SEQ ID NOs: 561 and 565 respectively; SEQ ID NOs: 609 and 613 respectively; SEQ ID NOs: 617 and 621 respectively; SEQ ID NOs: 681 and 685 respectively; SEQ ID NOs: 689 and 693 respectively; SEQ ID NOs: 697 and 701 respectively; SEQ ID NOs: 705 and 709 respectively; SEQ ID NOs: 713 and 717 respectively; SEQ ID NOs: 721 and 725 respectively; SEQ ID NOs: 729 and 733 respectively; SEQ ID NOs: 737 and 741 respectively; SEQ ID NOs: 745 and 749 respectively; SEQ ID NOs: 753 and 757 respectively; SEQ ID NOs: 761 and 765 respectively; SEQ ID NOs: 769 and 773 respectively; SEQ ID NOs: 785 and 789 respectively; SEQ ID NOs: 793 and 797 respectively; SEQ ID NOs: 801 and 805 respectively; SEQ ID NOs: 809 and 813 respectively; SEQ ID NOs: 817 and 821 respectively; SEQ ID NOs: 825 and 829 respectively; SEQ ID NOs: 833 and 837 respectively; SEQ ID NOs: 841 and 845 respectively; SEQ ID NOs: 849 and 853 respectively; SEQ ID NOs: 857 and 861 respectively; SEQ ID NOs: 865 and 869 respectively; SEQ ID NOs: 873 and 877 respectively; SEQ ID NOs: 881 and 885 respectively; SEQ ID NOs: 889 and 893 respectively; SEQ ID NOs: 945 and 949 respectively; SEQ ID NOs: 953 and 957 respectively; SEQ ID NOs: 961 and 965 respectively; SEQ ID NOs: 977 and 981 respectively; SEQ ID NOs: 985 and 989 respectively; SEQ ID NOs: 993 and 997 respectively; SEQ ID NOs: 1001 and 1005 respectively; SEQ ID NOs: 1009 and 1013 respectively; SEQ ID NOs: 1017 and 1021 respectively; SEQ ID NOs: 1025 and 1029 respectively; SEQ ID NOs: 1033 and 1037 respectively; SEQ ID NOs: 1041 and 1045 respectively; SEQ ID NOs: 1065 and 1069 respectively; SEQ ID NOs: 1073 and 1077 respectively; SEQ ID NOs: 1081 and 1085 respectively; SEQ ID NOs: 1089 and 1093 respectively; SEQ ID NOs: 1097 and 1101 respectively; SEQ ID NOs: 1113 and 1117 respectively; SEQ ID NOs: 1121 and 1125 respectively; SEQ ID NOs: 1129 and 1133 respectively; SEQ ID NOs: 1137 and 1141 respectively; SEQ ID NOs: 1145 and 1149 respectively; SEQ ID NOs: 1153 and 1157 respectively; SEQ ID NOs: 1161 and 1165 respectively; SEQ ID NOs: 1169 and 1173 respectively; SEQ ID NOs: 1185 and 1189 respectively; SEQ ID NOs: 1193 and 1197 respectively; SEQ ID NOs: 1201 and 1205 respectively; SEQ ID NOs: 1209 and 1213 respectively; SEQ ID NOs: 1217 and 1221 respectively; SEQ ID NOs: 1225 and 1229 respectively; SEQ ID NOs: 1233 and 1237 respectively; SEQ ID NOs: 1241 and 1245 respectively; SEQ ID NOs: 1249 and 1253 respectively; SEQ ID NOs: 1257 and 1261 respectively; SEQ ID NOs: 1265 and 1269 respectively; SEQ ID NOs: 1273 and 1277 respectively; SEQ ID NOs: 1281 and 1285 respectively; SEQ ID NOs: 1289 and 1293 respectively; SEQ ID NOs: 1297 and 1301 respectively; SEQ ID NOs: 1305 and 1309 respectively; SEQ ID NOs: 1313 and 1317 respectively; SEQ ID NOs: 1321 and 1325 respectively; SEQ ID NOs: 1329 and 1333 respectively; SEQ ID NOs: 1337 and 1341 respectively; SEQ ID NOs: 1345 and 1349 respectively; SEQ ID NOs: 1353 and 1357 respectively; SEQ ID NOs: 1361 and 1365 respectively; SEQ ID NOs: 1369 and 1373 respectively; SEQ ID NOs: 1377 and 1381 respectively; SEQ ID NOs: 1385 and 1389 respectively; SEQ ID NOs: 1393 and 1397 respectively; SEQ ID NOs: 1401 and 1405 respectively; SEQ ID NOs: 1409 and 1413 respectively; SEQ ID NOs: 1417 and 1421 respectively; SEQ ID NOs: 1433 and 1437 respectively; SEQ ID NOs: 1441 and 1445 respectively; SEQ ID NOs: 1457 and 1461 respectively; SEQ ID NOs: 1465 and 1469 respectively; SEQ ID NOs: 1473 and 1477 respectively; SEQ ID NOs: 1481 and 1485 respectively; SEQ ID NOs: 1489 and 1493 respectively; SEQ ID NOs: 1497 and 1501 respectively; SEQ ID NOs: 1505 and 1509 respectively; SEQ ID NOs: 1513 and 1517 respectively; SEQ ID NOs: 1521 and 1525 respectively; SEQ ID NOs: 1529 and 1533 respectively; SEQ ID NOs: 1545 and 1549 respectively; SEQ ID NOs: 1553 and 1557 respectively; SEQ ID NOs: 1561 and 1565 respectively; SEQ ID NOs: 1569 and 1573 respectively; SEQ ID NOs: 1577 and 1581 respectively; SEQ ID NOs: 1585 and 1589 respectively; SEQ ID NOs: 1593 and 1597 respectively; SEQ ID NOs: 1601 and 1605 respectively; SEQ ID NOs: 1609 and 1613 respectively; SEQ ID NOs: 1617 and 1621 respectively; SEQ ID NOs: 1625 and 1629 respectively; SEQ ID NOs: 1633 and 1637 respectively; SEQ ID NOs: 1649 and 1653 respectively; SEQ ID NOs: 1657 and 1661 respectively; SEQ ID NOs: 1673 and 1677 respectively; SEQ ID NOs: 1681 and 1685 respectively; SEQ ID NOs: 1689 and 1693 respectively; SEQ ID NOs: 1697 and 1701 respectively; SEQ ID NOs: 1705 and 1709 respectively; SEQ ID NOs: 1713 and 1717 respectively; SEQ ID NOs: 1721 and 1725 respectively; SEQ ID NOs: 1729 and 1733 respectively; SEQ ID NOs: 1737 and 1741 respectively; SEQ ID NOs: 1745 and 1749 respectively; SEQ ID NOs: 1753 and 1757 respectively; SEQ ID NOs: 1761 and 1765 respectively; SEQ ID NOs: 1769 and 1773 respectively; SEQ ID NOs: 1777 and 1781 respectively; SEQ ID NOs: 1785 and 1789 respectively; SEQ ID NOs: 1793 and 1797 respectively; SEQ ID NOs: 1801 and 1805 respectively; SEQ ID NOs: 1809 and 1813 respectively; SEQ ID NOs: 1817 and 1821 respectively; SEQ ID NOs: 1833 and 1837 respectively; SEQ ID NOs: 1841 and 1845 respectively; SEQ ID NOs: 1849 and 1853 respectively; SEQ ID NOs: 1857 and 1861 respectively; SEQ ID NOs: 1865 and 1869 respectively; SEQ ID NOs: 1873 and 1877 respectively; SEQ ID NOs: 1881 and 1885 respectively; SEQ ID NOs: 1889 and 1893 respectively; SEQ ID NOs: 1913 and 1917 respectively; SEQ ID NOs: 1937 and 1941 respectively; SEQ ID NOs: 1945 and 1949 respectively; SEQ ID NOs: 1953 and 1957 respectively; SEQ ID NOs: 1961 and 1965 respectively; SEQ ID NOs: 1969 and 1973 respectively; SEQ ID NOs: 1977 and 1981 respectively; SEQ ID NOs: 1985 and 1989 respectively; SEQ ID NOs: 1993 and 1997 respectively; SEQ ID NOs: 2001 and 2005 respectively; SEQ ID NOs: 2009 and 2013 respectively; SEQ ID NOs: 2017 and 2021 respectively; SEQ ID NOs: 2025 and 2029 respectively; SEQ ID NOs: 2033 and 2037 respectively; SEQ ID NOs: 2041 and 2045 respectively; SEQ ID NOs: 2049 and 2053 respectively; SEQ ID NOs: 2057 and 2061 respectively; SEQ ID NOs: 2065 and 2069 respectively; SEQ ID NOs: 2073 and 2077 respectively; SEQ ID NOs: 2081 and 2085 respectively; SEQ ID NOs: 2089 and 2093 respectively; SEQ ID NOs: 2097 and 2101 respectively; SEQ ID NOs: 2105 and 2109 respectively; SEQ ID NOs: 2113 and 2117 respectively; SEQ ID NOs: 2121 and 2125 respectively; SEQ ID NOs: 2129 and 2133 respectively; SEQ ID NOs: 2137 and 2141 respectively; SEQ ID NOs: 2145 and 2149 respectively; SEQ ID NOs: 2153 and 2157 respectively; SEQ ID NOs: 2161 and 2165 respectively; SEQ ID NOs: 2169 and 2173 respectively; SEQ ID NOs: 2177 and 2181 respectively; SEQ ID NOs: 2185 and 2189 respectively; SEQ ID NOs: 2193 and 2197 respectively; SEQ ID NOs: 2201 and 2205 respectively; SEQ ID NOs: 2209 and 2213 respectively; SEQ ID NOs: 2217 and 2221 respectively; SEQ ID NOs: 2225 and 2229 respectively; SEQ ID NOs: 2233 and 2237 respectively; SEQ ID NOs: 2241 and 2245 respectively; SEQ ID NOs: 2249 and 2253 respectively; SEQ ID NOs: 2257 and 2261 respectively; SEQ ID NOs: 2273 and 2277 respectively; SEQ ID NOs: 2281 and 2285 respectively; SEQ ID NOs: 2305 and 2309 respectively; SEQ ID NOs: 2313 and 2317 respectively; SEQ ID NOs: 2321 and 2325 respectively; SEQ ID NOs: 2329 and 2333 respectively; SEQ ID NOs: 2337 and 2341 respectively; and SEQ ID NOs: 2345 and 2349 respectively.

10. (canceled)

11. The heterodimeric multispecific antibody of claim 1, wherein each of VL-1 and VH-1 comprise a V_{L} amino acid sequence and a V_{H} amino acid sequence selected from the group consisting of SEQ ID NOs: 9 and 13 respectively; SEQ ID NOs: 49 and 53 respectively; SEQ ID NOs: 57 and 61 respectively; SEQ ID NOs: 65 and 69 respectively; SEQ ID NOs: 81 and 85 respectively; SEQ ID NOs: 153 and 157 respectively; SEQ ID NOs: 161 and 165 respectively; SEQ ID NOs: 193 and 197 respectively; SEQ ID NOs: 201 and 205 respectively; SEQ ID NOs: 273 and 277 respectively; SEQ ID NOs: 281 and 285 respectively; SEQ ID NOs: 289 and 293 respectively; SEQ ID NOs: 297 and 301 respectively; SEQ ID NOs: 305 and 309 respectively; SEQ ID NOs: 313 and 317 respectively; SEQ ID NOs: 361 and 365 respectively; SEQ ID NOs: 377 and 381 respectively; SEQ ID NOs: 393 and 397 respectively; SEQ ID NOs: 401 and 405 respectively; SEQ ID NOs: 409 and 413 respectively; SEQ ID NOs: 417 and 421 respectively; SEQ ID NOs: 425 and 429 respectively; SEQ ID NOs: 433 and 437 respectively; SEQ ID NOs: 441 and 445 respectively; SEQ ID NOs: 449 and 453 respectively; SEQ ID NOs: 457 and 461 respectively; SEQ ID NOs: 465 and 469 respectively; SEQ ID NOs: 681 and 685 respectively; SEQ ID NOs: 689 and 693 respectively; SEQ ID NOs: 697 and 701 respectively; SEQ ID NOs: 705 and 709 respectively; SEQ ID NOs: 713 and 717 respectively; SEQ ID NOs: 721 and 725 respectively; SEQ ID NOs: 737 and 741 respectively; SEQ ID NOs: 745 and 749 respectively; SEQ ID NOs: 753 and 757 respectively; SEQ ID NOs: 761 and 765 respectively; SEQ ID NOs: 777 and 781 respectively; SEQ ID NOs: 825 and 829 respectively; SEQ ID NOs: 833 and 837 respectively; SEQ ID NOs: 841 and 845 respectively; SEQ ID NOs: 953 and 957 respectively; SEQ ID NOs: 961 and 965 respectively; SEQ ID NOs: 977 and 981 respectively; SEQ ID NOs: 993 and 997 respectively; SEQ ID NOs: 1001 and 1005 respectively; SEQ ID NOs: 1009 and 1013 respectively; SEQ ID NOs: 1017 and 1021 respectively; SEQ ID NOs: 1033 and 1037 respectively; SEQ ID NOs: 1049 and 1053 respectively; SEQ ID NOs: 1073 and 1077 respectively; SEQ ID NOs: 1081 and 1085 respectively; SEQ ID NOs: 1089 and 1093 respectively; SEQ ID NOs: 1105 and 1109 respectively; SEQ ID NOs: 1129 and 1133 respectively; SEQ ID NOs: 1137 and 1141 respectively; SEQ ID NOs: 1153 and 1157 respectively; SEQ ID NOs: 1161 and 1165 respectively; SEQ ID NOs: 1177 and 1181 respectively; SEQ ID NOs: 1225 and 1229 respectively; SEQ ID NOs: 1241 and 1245 respectively; SEQ ID NOs: 1257 and 1261 respectively; SEQ ID NOs: 1265 and 1269 respectively; SEQ ID NOs: 1297 and 1301 respectively; SEQ ID NOs: 1393 and 1397 respectively; SEQ ID NOs: 1409 and 1413 respectively; SEQ ID NOs: 1425 and 1429 respectively; SEQ ID NOs: 1441 and 1445 respectively; SEQ ID NOs: 1449 and 1453 respectively; SEQ ID NOs: 1457 and 1461 respectively; SEQ ID NOs: 1465 and 1469 respectively; SEQ ID NOs: 1473 and 1477 respectively; SEQ ID NOs: 1481 and 1485 respectively; SEQ ID NOs: 1497 and 1501 respectively; SEQ ID NOs: 1505 and 1509 respectively; SEQ ID NOs: 1513 and 1517 respectively; SEQ ID NOs: 1521 and 1525 respectively; SEQ ID NOs: 1529 and 1533 respectively; SEQ ID NOs: 1545 and 1549 respectively; SEQ ID NOs: 1553 and 1557 respectively; SEQ ID NOs: 1561 and 1565 respectively; SEQ ID NOs: 1569 and 1573 respectively; SEQ ID NOs: 1577 and 1581 respectively; SEQ ID NOs: 1585 and 1589 respectively; SEQ ID NOs: 1609 and 1613 respectively; SEQ ID NOs: 1617 and 1621 respectively; SEQ ID NOs: 1649 and 1653 respectively; SEQ ID NOs: 1657 and 1661 respectively; SEQ ID NOs: 1673 and 1677 respectively; SEQ ID NOs: 1689 and 1693 respectively; SEQ ID NOs: 1697 and 1701 respectively; SEQ ID NOs: 1705 and 1709 respectively; SEQ ID NOs: 1713 and 1717 respectively; SEQ ID NOs: 1721 and 1725 respectively; SEQ ID NOs: 1729 and 1733 respectively; SEQ ID NOs: 1745 and 1749 respectively; SEQ ID NOs: 1753 and 1757 respectively; SEQ ID NOs: 1761 and 1765 respectively; SEQ ID NOs: 1769 and 1773 respectively; SEQ ID NOs: 1777 and 1781 respectively; SEQ ID NOs: 1785 and 1789 respectively; SEQ ID NOs: 1793 and 1797 respectively; SEQ ID NOs: 1817 and 1821 respectively; SEQ ID NOs: 1833 and 1837 respectively; SEQ ID NOs: 1841 and 1845 respectively; SEQ ID NOs: 1849 and 1853 respectively; SEQ ID NOs: 1857 and 1861 respectively; SEQ ID NOs: 1865 and 1869 respectively; SEQ ID NOs: 1889 and 1893 respectively; SEQ ID NOs: 2257 and 2261 respectively; SEQ ID NOs: 2265 and 2269 respectively; SEQ ID NOs: 2281 and 2285 respectively; SEQ ID NOs: 2297 and 2301 respectively; SEQ ID NOs: 2305 and 2309 respectively; SEQ ID NOs: 2313 and 2317 respectively; SEQ ID NOs: 2321 and 2325 respectively; SEQ ID NOs: 2329 and 2333 respectively; SEQ ID NOs: 2337 and 2341 respectively; and SEQ ID NOs: 2345 and 2349 respectively.

12. The heterodimeric multispecific antibody of claim 1, wherein each of VL-3 and VH-3 comprise a V_{L} amino acid sequence and a V_{H} amino acid sequence selected from the group consisting of SEQ ID NOs: 9 and 13 respectively; SEQ ID NOs: 49 and 53 respectively; SEQ ID NOs: 57 and 61 respectively; SEQ ID NOs: 65 and 69 respectively; SEQ ID NOs: 81 and 85 respectively; SEQ ID NOs: 153 and 157 respectively; SEQ ID NOs: 161 and 165 respectively; SEQ ID NOs: 193 and 197 respectively; SEQ ID NOs: 201 and 205 respectively; SEQ ID NOs: 273 and 277 respectively; SEQ ID NOs: 281 and 285 respectively; SEQ ID NOs: 289 and 293 respectively; SEQ ID NOs: 297 and 301 respectively; SEQ ID NOs: 305 and 309 respectively; SEQ ID NOs: 313 and 317 respectively; SEQ ID NOs: 361 and 365 respectively; SEQ ID NOs: 377 and 381 respectively; SEQ ID NOs: 393 and 397 respectively; SEQ ID NOs: 401 and 405 respectively; SEQ ID NOs: 409 and 413 respectively; SEQ ID NOs: 417 and 421 respectively; SEQ ID NOs: 425 and 429 respectively; SEQ ID NOs: 433 and 437 respectively; SEQ ID NOs: 441 and 445 respectively; SEQ ID NOs: 449 and 453 respectively; SEQ ID NOs: 457 and 461 respectively; SEQ ID NOs: 465 and 469 respectively; SEQ ID NOs: 681 and 685 respectively; SEQ ID NOs: 689 and 693 respectively; SEQ ID NOs: 697 and 701 respectively; SEQ ID NOs: 705 and 709 respectively; SEQ ID NOs: 713 and 717 respectively; SEQ ID NOs: 721 and 725 respectively; SEQ ID NOs: 737 and 741 respectively; SEQ ID NOs: 745 and 749 respectively; SEQ ID NOs: 753 and 757 respectively; SEQ ID NOs: 761 and 765 respectively; SEQ ID NOs: 777 and 781 respectively; SEQ ID NOs: 825 and 829 respectively; SEQ ID NOs: 833 and 837 respectively; SEQ ID NOs: 841 and 845 respectively; SEQ ID NOs: 953 and 957 respectively; SEQ ID NOs: 961 and 965 respectively; SEQ ID NOs: 977 and 981 respectively; SEQ ID NOs: 993 and 997 respectively; SEQ ID NOs: 1001 and 1005 respectively; SEQ ID NOs: 1009 and 1013 respectively; SEQ ID NOs: 1017 and 1021 respectively; SEQ ID NOs: 1033 and 1037 respectively; SEQ ID NOs: 1049 and 1053 respectively; SEQ ID NOs: 1073 and 1077 respectively; SEQ ID NOs: 1081 and 1085 respectively; SEQ ID NOs: 1089 and 1093 respectively; SEQ ID NOs: 1105 and 1109 respectively; SEQ ID NOs: 1129 and 1133 respectively; SEQ ID NOs: 1137 and 1141 respectively; SEQ ID NOs: 1153 and 1157 respectively; SEQ ID NOs: 1161 and 1165 respectively; SEQ ID NOs: 1177 and 1181 respectively; SEQ ID NOs: 1225 and 1229 respectively; SEQ ID NOs: 1241 and 1245 respectively; SEQ ID NOs: 1257 and 1261 respectively; SEQ ID NOs: 1265 and 1269 respectively; SEQ ID NOs: 1297 and 1301 respectively; SEQ ID NOs: 1393 and 1397 respectively; SEQ ID NOs: 1409 and 1413 respectively; SEQ ID NOs: 1425 and 1429 respectively; SEQ ID NOs: 1441 and 1445 respectively; SEQ ID NOs: 1449 and 1453 respectively; SEQ ID NOs: 1457 and 1461 respectively; SEQ ID NOs: 1465 and 1469 respectively; SEQ ID NOs: 1473 and 1477 respectively; SEQ ID NOs: 1481 and 1485 respectively; SEQ ID NOs: 1497 and 1501 respectively; SEQ ID NOs: 1505 and 1509 respectively; SEQ ID NOs: 1513 and 1517 respectively; SEQ ID NOs: 1521 and 1525 respectively; SEQ ID NOs: 1529 and 1533 respectively; SEQ ID NOs: 1545 and 1549 respectively; SEQ ID NOs: 1553 and 1557 respectively; SEQ ID NOs: 1561 and 1565 respectively; SEQ ID NOs: 1569 and 1573 respectively; SEQ ID NOs: 1577 and 1581 respectively; SEQ ID NOs: 1585 and 1589 respectively; SEQ ID NOs: 1609 and 1613 respectively; SEQ ID NOs: 1617 and 1621 respectively; SEQ ID NOs: 1649 and 1653 respectively; SEQ ID NOs: 1657 and 1661 respectively; SEQ ID NOs: 1673 and 1677 respectively; SEQ ID NOs: 1689 and 1693 respectively; SEQ ID NOs: 1697 and 1701 respectively; SEQ ID NOs: 1705 and 1709 respectively; SEQ ID NOs: 1713 and 1717 respectively; SEQ ID NOs: 1721 and 1725 respectively; SEQ ID NOs: 1729 and 1733 respectively; SEQ ID NOs: 1745 and 1749 respectively; SEQ ID NOs: 1753 and 1757 respectively; SEQ ID NOs: 1761 and 1765 respectively; SEQ ID NOs: 1769 and 1773 respectively; SEQ ID NOs: 1777 and 1781 respectively; SEQ ID NOs: 1785 and 1789 respectively; SEQ ID NOs: 1793 and 1797 respectively; SEQ ID NOs: 1817 and 1821 respectively; SEQ ID NOs: 1833 and 1837 respectively; SEQ ID NOs: 1841 and 1845 respectively; SEQ ID NOs: 1849 and 1853 respectively; SEQ ID NOs: 1857 and 1861 respectively; SEQ ID NOs: 1865 and 1869 respectively; SEQ ID NOs: 1889 and 1893 respectively; SEQ ID NOs: 2257 and 2261 respectively; SEQ ID NOs: 2265 and 2269 respectively; SEQ ID NOs: 2281 and 2285 respectively; SEQ ID NOs: 2297 and 2301 respectively; SEQ ID NOs: 2305 and 2309 respectively; SEQ ID NOs: 2313 and 2317 respectively; SEQ ID NOs: 2321 and 2325 respectively; SEQ ID NOs: 2329 and 2333 respectively; SEQ ID NOs: 2337 and 2341 respectively; and SEQ ID NOs: 2345 and 2349 respectively.

13. (canceled)

14. The heterodimeric multispecific antibody of claim 1, wherein each of VL-4 and VH-4 comprise a V_{L} amino acid sequence and a V_{H} amino acid sequence selected from the group consisting of SEQ ID NOs: 17 and 21 respectively; SEQ ID NOs: 25 and 29 respectively; SEQ ID NOs: 33 and 37 respectively; SEQ ID NOs: 41 and 45 respectively; SEQ ID NOs: 121 and 125 respectively; SEQ ID NOs: 137 and 141 respectively; SEQ ID NOs: 169 and 173 respectively; SEQ ID NOs: 177 and 181 respectively; SEQ ID NOs: 185 and 189 respectively; SEQ ID NOs: 193 and 197 respectively; SEQ ID NOs: 201 and 205 respectively; SEQ ID NOs: 209 and 213 respectively; SEQ ID NOs: 217 and 221 respectively; SEQ ID NOs: 225 and 229 respectively; SEQ ID NOs: 233 and 237 respectively; SEQ ID NOs: 241 and 245 respectively; SEQ ID NOs: 249 and 253 respectively; SEQ ID NOs: 257 and 261 respectively; SEQ ID NOs: 265 and 269 respectively; SEQ ID NOs: 321 and 325 respectively; SEQ ID NOs: 329 and 333 respectively; SEQ ID NOs: 337 and 341 respectively; SEQ ID NOs: 393 and 397 respectively; SEQ ID NOs: 401 and 405 respectively; SEQ ID NOs: 409 and 413 respectively; SEQ ID NOs: 473 and 477 respectively; SEQ ID NOs: 481 and 485 respectively; SEQ ID NOs: 489 and 493 respectively; SEQ ID NOs: 497 and 501 respectively; SEQ ID NOs: 505 and 509 respectively; SEQ ID NOs: 513 and 517 respectively; SEQ ID NOs: 545 and 549 respectively; SEQ ID NOs: 553 and 557 respectively; SEQ ID NOs: 561 and 565 respectively; SEQ ID NOs: 569 and 573 respectively; SEQ ID NOs: 577 and 581 respectively; SEQ ID NOs: 585 and 589 respectively; SEQ ID NOs: 593 and 597 respectively; SEQ ID NOs: 601 and 605 respectively; SEQ ID NOs: 625 and 629 respectively; SEQ ID NOs: 633 and 637 respectively; SEQ ID NOs: 641 and 645 respectively; SEQ ID NOs: 649 and 653 respectively; SEQ ID NOs: 657 and 661 respectively; SEQ ID NOs: 665 and 669 respectively; SEQ ID NOs: 673 and 677 respectively; SEQ ID NOs: 681 and 685 respectively; SEQ ID NOs: 689 and 693 respectively; SEQ ID NOs: 697 and 701 respectively; SEQ ID NOs: 705 and 709 respectively; SEQ ID NOs: 713 and 717 respectively; SEQ ID NOs: 721 and 725 respectively; SEQ ID NOs: 729 and 733 respectively; SEQ ID NOs: 737 and 741 respectively; SEQ ID NOs: 745 and 749 respectively; SEQ ID NOs: 753 and 757 respectively; SEQ ID NOs: 761 and 765 respectively; SEQ ID NOs: 769 and 773 respectively; SEQ ID NOs: 785 and 789 respectively; SEQ ID NOs: 793 and 797 respectively; SEQ ID NOs: 801 and 805 respectively; SEQ ID NOs: 809 and 813 respectively; SEQ ID NOs: 817 and 821 respectively; SEQ ID NOs: 849 and 853 respectively; SEQ ID NOs: 857 and 861 respectively; SEQ ID NOs: 865 and 869 respectively; SEQ ID NOs: 873 and 877 respectively; SEQ ID NOs: 881 and 885 respectively; SEQ ID NOs: 889 and 893 respectively; SEQ ID NOs: 897 and 901 respectively; SEQ ID NOs: 905 and 909 respectively; SEQ ID NOs: 913 and 917 respectively; SEQ ID NOs: 921 and 925 respectively; SEQ ID NOs: 929 and 933 respectively; SEQ ID NOs: 937 and 941 respectively; SEQ ID NOs: 945 and 949 respectively; SEQ ID NOs: 969 and 973 respectively; SEQ ID NOs: 977 and 981 respectively; SEQ ID NOs: 1009 and 1013 respectively; SEQ ID NOs: 1057 and 1061 respectively; SEQ ID NOs: 1537 and 1541 respectively; SEQ ID NOs: 1569 and 1573 respectively; SEQ ID NOs: 1601 and 1605 respectively; SEQ ID NOs: 1641 and 1645 respectively; SEQ ID NOs: 1665 and 1669 respectively; SEQ ID NOs: 1825 and 1829 respectively; SEQ ID NOs: 1865 and 1869 respectively; SEQ ID NOs: 1897 and 1901 respectively; SEQ ID NOs: 1905 and 1909 respectively; SEQ ID NOs: 1913 and 1917 respectively; SEQ ID NOs: 1921 and 1925 respectively; SEQ ID NOs: 1929 and 1933 respectively; SEQ ID NOs: 2265 and 2269 respectively; SEQ ID NOs: 2281 and 2285 respectively; 2289 and 2293 respectively; 2329 and 2333 respectively; and SEQ ID NOs: 2345 and 2349, respectively.

15. The heterodimeric multispecific antibody of claim 1, wherein the first immunoglobulin or the third immunoglobulin
binds to a cell surface antigen selected from the group consisting of a2b b3 (Glycoprotein IIb/IIIa), a4, a4b7, a4b7+aEb7, a5, Activin receptor type-2B, ALK1, Alpha-synuclein, amyloid beta, APP, AXL, Blood Group A, CAIX, CCL-2, CD105 (endoglin), CD115 (CSF1R), CD116a (CSF2Ra), CD123, CD152 (CTLA4), CD184 (CXCR4), CD19, CD192 (CCR2), CD194 (CCR4), CD195 (CCR5), CD20, CD200, CD22, CD221 (IGF1R), CD248, CD25, CD257 (BAFF), CD26, CD262 (DR5), CD276 (B7H3), CD3, CD30 (TNFRSF8), CD319 (SLAMF7), CD33, CD332 (FGFR2), CD350 (FZD10), CD37, CD371 (CLEC12A), CD38, CD4, CD49b (a2), CD51 (a5), CD52, CD56, CD61 (a4b3), CD70, CD73 (NTSE), CD74, CEA, Claudin-18.2, cMET, CRLR, DLL3, DLL4, DNA/histone (H1) complex, EGFR, EpCAM, EGFR-HER3, EGFRvIII, EphA3, ERGT(GalNAc) Tn Antigen, FLT1, FOLR1, frizzled family receptor (FZD), Lewis Y, Lewis X, GCGR, GD2, GD2 α-acetyl, GD3, GM1, GM1 fucosyl, GM2, GPA33, GPNMB, GUCY2C, HER2, HER3, HGFR (cMET), IgHe, IGLF2, Kallikreins, LINGO1, LOXL2, Ly6/PLAUR domain-containing protein 3, MADCAM1, MAG, Mesothelin, MT1-MMP (MMP14), MUC1, Mucin SAC, NaPi2b, NeuGc-GM3, notch, NOTCH2/NOTCH3 receptors, oxLDL, P-selectin, PCSK9, PDGFRA, PDGFRa, phosphatidylserine, polysialic acid, PSMA, PVRL4, RGMA, CD240D Blood group D antigen, root plate-specific spondin 3, serum amyloid P component, STEAP-1, TACSTD2, TGFb, TWEAKR, TYRP1, VEGFR2, VSIR, CD171 (L1CAM), CD19, CD47, pMHC[NY-ESO1], pMHC[MART1], pMHC[MAGEA1], pMHC[Tyrosinase], pMHC[gp100], pMHC[MUC1], pMHC[tax], pMHC[WT-1], pMHC[EBNA-1], pMHC[LMP2], pMHC[hTERT], GPC3, CD80, CD23, and fibronectin extra domain-B, or
bind to two different epitopes on a target cell, optionally wherein the target cell is a cancer cell.

16. (canceled)

17. (canceled)

18. The heterodimeric multispecific antibody of claim 1, wherein the second immunoglobulin or the fourth immunoglobulin
bind to an epitope on a white blood cell, a monocyte, a lymphocyte, a granulocyte, a macrophage, a T cell, a NK cell, a B cell, a NKT cell, an ILC, or neutrophil, or
bind to an antigen selected from the group consisting of Dabigatran, a4, a4b7, a4b7 +aEb7, a5, AXL, BnDOTA, CD11a (LFA-1), CD3, CD4, CD8, CD16, CD19, CD22, CD23, CD25, CD28, CD30 (TNFRSF8), CD33, CD38, CD40, CD40L, CD47, CD49b (a2), CD54 (ICAM-1), CD56, CD74, CD80, CD115 (CSF1R), CD116a (CSF2Ra), CD123, CD134 (OX40), CD137 (41BB), CD152 (CTLA4), CD184 (CXCR4), CD192 (CCR2), CD194 (CCR4), CD195 (CCR5), CD223 (LAG-3), CD252 (OX40L), CD254 (RANKL), CD262 (DR5), CD27, CD200, CD221 (IGF1R), CD248, CD274 (PD-L1), CD275 (ICOS-L), CD278 (ICOS), CD279 (PD-1), CD319 (SLAMF7), CD371 (CLEC12A), MADCAM1, MT1-MMP (MMP14), NKG2A, NRP1,TIGIT, VSIR, KIRDL1/2/3, and KIR2DL2, or
bind to two different epitopes on a white blood cell, a monocyte, a lymphocyte, a granulocyte, a macrophage, a T cell, a NK cell, a B cell, a NKT cell, an ILC, or neutrophil.

19. (canceled)

20. (canceled)

21. The heterodimeric multispecific antibody of claim 1, wherein
the second immunoglobulin binds CD3 and the fourth immunoglobulin binds an immune cell receptor selected from the group consisting of CD4, CD8, CD25, CD28, CTLA4, OX40, ICOS, PD-1, PD-L1, 41BB, CD2, CD69, and CD45, or
the second immunoglobulin binds CD16 and the fourth immunoglobulin binds an immune cell receptor selected from the group consisting of CD56, NKG2D, and KIRDL1/2/3, or
wherein the fourth immunoglobulin binds to an agent selected from the group consisting of a cytokine, a nucleic acid, a hapten, a small molecule, a radionuclide, an immunotoxin, a vitamin, a peptide, a lipid, a carbohydrate, biotin, digoxin, or any conjugated variants thereof, or
wherein the antibody is a monoclonal antibody, a chimeric antibody, or a humanized antibody.

22. (canceled)

23. (canceled)

24. The heterodimeric multispecific antibody of claim 1, wherein the first immunoglobulin and the third immunoglobulin
bind to their respective epitopes with a monovalent affinity or an effective affinity between about 100 nM to about 100 pM, or
bind to cell surface epitopes that are between 60 and 120 angstroms apart, or
bind to their respective epitopes with a monovalent affinity or an effective affinity that is less than 100 pM, or
bind to cell surface epitopes that are up to 180 angstroms apart.

25. (canceled)

26. (canceled)

27. (canceled)

28. The heterodimeric multispecific antibody of claim 1, wherein the first heterodimerization domain and/or the second heterodimerization domain is a CH2-CH3 domain and has an isotype selected from the group consisting of IgG1, IgG2, IgG3, IgG4, IgA1, IgA2, IgM, IgD, and IgE, optionally wherein
the first heterodimerization domain and/or the second heterodimerization domain is an IgG1 constant region comprising one or more amino acid substitutions selected from the group consisting of N297A and K322A, or
the first heterodimerization domain is a CH2-CH3 domain comprising a K409R mutation and the second heterodimerization domain is a CH2-CH3 domain comprising a F405L mutation.

29. (canceled)

30. (canceled)

31. (canceled)

32. A recombinant nucleic acid sequence encoding the heterodimeric multispecific antibody of claim 1.

33. A host cell or vector comprising the recombinant nucleic acid sequence of claim 32.

34. A composition comprising the heterodimeric multispecific antibody of claim 1 and a pharmaceutically-acceptable carrier, wherein the antibody is optionally conjugated to an agent selected from the group consisting of isotopes, dyes, chromagens, contrast agents, drugs, toxins, cytokines, enzymes, enzyme inhibitors, hormones, hormone antagonists, growth factors, radionuclides, metals, liposomes, nanoparticles, RNA, DNA or any combination thereof.

35. A method for treating cancer in a subject in need thereof, comprising administering to the subject an effective amount of the heterodimeric multispecific antibody of claim 1, optionally wherein
the cancer is selected from the group consisting of lung cancer, colorectal cancer, skin cancer, breast cancer, ovarian cancer, leukemia, pancreatic cancer, and gastric cancer, or
the heterodimeric multispecific antibody is administered to the subject separately, sequentially or simultaneously with an additional therapeutic agent.

36. (canceled)

37. (canceled)

38. A kit comprising the heterodimeric multispecific antibody of claim 1, and instructions for use.
